United States Patent Application Publication US 2025/0146087 A1 - sequence listing, part 3

SEQ ID NO: 40 - DNA, 56302 bp, Peptoniphilus rachelemmaiella
  source 1..56302: mol_type = genomic DNA
cattcatgggctttctaaaagggaagagcagtatcatgatctatgaacgatggggagacatgaaatttaaatataggggaaggcagttttggtgccgaggctattacgtcgatacagcgggaaaaaacgctaaaaagattcaagagtatatacaaaaccagttgaaagaggatcaaataagtgagcaactaacctttgacacggcgaacccctttaaggggtagtcgagtaacgtaagcacgggcagaccaccgacgcccttcaggcgcagctagtaatacaggccctttgggccgaaaaaggaaaacccccggctacgccgggggatgtttattgtgggcgaaaagccgaaaaaaacacgccaccgatttcggtgacgcgttcgcttaacagtaattttccgccaaaatacagcgcatgcttccgccgccgtaggtggagatcacatccaaaggcacgtggatgattcggtgggtggcttcgatctgcgcgatttgctcgtcggtgaagtgttcgtaggcctcttcactcattaggtagagcttttcatcgcccataagctccaggcaattgccgcagaagtgatcgatttgctcgccggtcagctcgatgaccgtttttttcgtggcgcgcaattgatccatgagcccctctttattttccgtgagaagctcggccgccaccacggcgaaatcgtcggccacagacaaaatcacattggtgtgatacaccgccgcatcgtgttggcgggccttaaaaggcagaggcttaaagccgtaggtgcggcaaaaagcgagaaaagcctctttttcgcagcgcttggagaggcagccgtaggcgatcatttccttgcgatccaaaaccacggagcccgtgccctccagcacaccgaaatttttatcgcgaaaatccgtcacatccagcgcggaaaaattaagcagggcgtccaactgatcctttagcttgggaaactcccgccgccggttttcgctgtacatgggggcgatgaaaagcttgtccgggaaagtaacgaaaatattgttgggaaaaatcgaatccggcgtgtcgtcgcccttatcgtgcaagacatccacctgcacaccggcttcctccagggcgcgaaccacggcggaaaactcctcgttcgcccgatcctgcacctcgctggccgtgcgggtcgtgtcgttaatttgatagacattgtctgcggcggtttccatattaaaacgaaaggccgaggggcgaaccattatgaccttacgagcaatcatagccactcctttcatctgctacataacatttacatcccgtctattttacaacagatggcgacctttgcccagagggcgtgggggaaaagggtcttatggcttttcagagaagaaagttcgcagacgaaagcgtgaaaagcttttgcgttttttgcattctcgtaaaaaccacacgaaaagaacggttaaaaaagcacggataaatgaatcaaattgccaagatctgtttgaaacccgtgaaataacacggattcaggctgctttggggattgatattttctaaaccaccatggaaatttcaattgccttgtgttatgatgaatacgttggagcgagggcgttctcacgtggcaaatagtcaccgcattttttatttcccgaaagggaaagcctttgctcttctaacgaggcattaagccaactcattttctttaaggaggaatattgtatgagctatcttgaaagtgtaatcgaacgtgttaaagaaagacacgccagcgaacctgaattctgccaaaccgtagaagaagtattaggttctttaaaaccggttattgatcaacatccggaatacgaacgcgtagaccttttaggccgcatggttgaaccggaacgtctcttcagcttccgtgttgtatggcaagacgacgaaggtcaataccacaccaacattggctaccgttgccaatttaacggggcgcttgggccgtacaagggcggtatccgcttccatcccaccgttaaccaatccgttattaagttcctcggcttcgaacaatgcttcaagaactccatgaccggcctccccatcggcggcggcaagggcggcagtgacttcgacccccgcggtagaagtgacgacgaaatcatgcgtttctgccaaagctttatcagcaccctttatcactacatcgggcccgacaccgacgttccggcaggtgacatgggcgttggcgcaagagaagtcggcttcatgtacggtcaatatcgccacttaaaagctaaattcgaaaacggtaccttcaccggtaaaggcttcagcttcggtggttcccgcgtacgtcccgaagctaccggctacggcgcagtttactacctcttgaacgtcctcgatcacttcggcgaagacatcaaagacaagaagatcgctgtttccggtttcggtaacgtatcttggggtatctgcaagaaagttcaacaactgggcggtaaagtcgttaccatcgcaggtcccgacggatacatctacgataaagacggtatcaacaccgaagaaaaagttaactacatgctcgagatgcgtgcttccggtcgcgacaaggttcaagactacgcagacaaattcggcgtagacttcttccccggtgaaaaaccctggatcaacgcagaatacgacatcgctatgccggctgcttaccaaaatgaaatcaccatcgaagaagcaaaagccatggttgaaaagggcgtagaatactacatcgaagtagctaacatgcctaccaccaacgaagctttgaactacctcatcgaaaacgtgaaggttgttgctccttccaaggctgttaacgccggtggtgttgcaggttccgcactcgaaatgagccaaaatagtgctcgcctgagctggcccgcagaagaagttgacaaacaacttcacatgatcatggacaacatctacaagatgtccgtcgaagcagctgaacaatacggcttaggctacaacctcgtagccggtgctaacattgccggtttcgttcgcttagcagacgccatgatggcacaaggtgtattctagaatacaaaaagagcagtactcttttcgtaaaagaataaaatgactacaaaagatcgcgtacgacctacgcggtctttttgtatgttatgagtggcgggcatgatttcggaagaagcgggtacaagagaaaaaagggggaataggaaatgaatgtaaatgaaaaagacgcactgaatctgcttatgaaatacaacaccgatccctttcacctgcgccacgccctcaccgtaaaagaagtgatggcatccttcgcacgggaactgggctacgaggatgaggcggacttctgggccatggcgggccttttacacgacgtggattacgagcagtttcccgaggaacactgcaaaagggcgccggagctcttggcggaaatcgacgcccccgatgcactcgttcgcgccattgtgagccacggcaggggaatttgcgccgacgtggagccggagcacaccatggaaaaagtgctttacgccaccgatgagctcacgggcttgatttacgtctacgccattatgcggccctcgggctccgtgcaggacatgaagctgaagagcttaaagaaaaaattcaaagacaagaaatttgccgccggcgtggactgagacaccattcttcgcggcgcggatatgctgggctgggagacggacgagctccttacccgcaccatggccgccatggcggaaacggaagaagccgtagccgagcagctcgcttctttaaccgcagaaaaataaaagcaaaaaaagaaggcgccttgaaaaatcaaggggcctttttcgtatcctttgttcctttcttaaaaacgtgctacactgaatttagcggatctcagccaccacataggcgaggattttttccgacacgtcgatgcccgtggcttgttgaaagcccaagtagctcatattggaattgatttccaccaaaagggggccgctgtgggagtcgataaggtcgatgcccgaaaaggcgaggtgtgcccctttatgggcggcgagggccagttctttttcttcctcggtgagatcaatgggccgtgccgtggatcctgcggcgatgttggcgcggaagtcgtgctcgtttctgcgctcgatggcgccgaggatcccgtcgcccacgacgagcacccgcttgtcgaccccggcggattcggcgataaagggctgaaagagataatcttccgcccccatgtttgtcgcaatcaccttcgcttcgtcgcgattgtttgcgagaaacacctgctcgccgaaggagcctttggcggctttaatgaccatggggtagccgaagcggccttccacataggcgagaaagtcgtctgtgggcacctgcgcccggtagtggaagggggcggggacggtgtcgatcatgggaaggaaaggcgccagggcgtcgaaggtggcgattttgtcgtcggccaaggcgatggcgttcgccggattaaagagggggcattgcttttccagtgcccgggcgaggcgcacgtctttgtcgaaaaacaagatggcgtcgggggcgggatcgccctttatgtcgcgggcgaggaagccctcttttcccgccgaaagcacgtagtctgtgtggggcttggcaagaatgtccgcccctttggcggcgagatcctgcaccaccttgtggatggcgaaggaaaagtaaccgtgataaataatgtgaatcatgaaacctccggaggtagtatgtctatagaatctattcgaaatgaaatcgacgccgtggacgacgcgctggcggatcttttaaaggcccgcttcgatttgtctcgcgccatgggcgaggagaagaagaaggtgggccgggcggtttacgatcccgacagggaggcagccctcctcgcccgagtggagaagaaggctgcgccctatggcggcgaagtgcgtgccctctatgaaaaaatgatggaactttcccgaaaccttcaggagtaaaacctcctcttgattataaccgatttcacctatgatataatcaagggaggagggatcctatgaaaattttaattacagaagacgaatcggccattgccgaaatcatcgcatacaatttatccaacgaaggctacgaaaccgccatggcaaaagacggcgtagactgcttggaaaccttcgacacctgggcgccggatttggtgcttttggatgtcatgatgccgcgcatggacggctttgaaaccttgcgggagatccgcaagaaaagtcgggtgccggtgattatgcttacggcgaaagattccgaaggcgatcgcattcgcggtttggaactgggcgccgacgattatgtggtgaagcccttcagcatgggggaattaatcgcccgcgtgaaggcgaatttccgccgccaggatttcgaaaacgaaggctatttgcccgacgaggtcatcgaagaggcggatctgaacatcgatcccgtgaagtatgaagtgacgaagcgggggaaagtgatcgagctcacccttcgtgagtttgagcttctgaagtacttagcccagtcgccgggcacggtctttagccgggaaaccctcctggaagaggtgtggggctatgaatattacggcgacattcgcaccgtggatgtgacggtgcgccgtttgcgtgaaaaaattgaagatgcgggggaagatttccgctacattctgacgaagcgaggagtgggctattactttggaggataagcattattccagcattaagtggcgatttatttttatctacgttcttctcgtcttggtggttatggccattatcggcgcttttatcgtcaatcgactggaagacgcgcagctggagaaagtacagacggacatggagcagaccctaagctccatggccaattcatcgccctatttgacggaaacgccctgggatgaggtgcacagccgcattcaaaacaccttggacgcctggcgcatcggaagcgacgaggccatttatgccattggccccgggcgggtgcccaagattattgcctccaccaacaattccggggagctggtggcggggcaaaatgccctgggcgattccgatttatcgccgaaactgattttagacggcttccgcggcgaaggctcttccgtgattcgcgaagacgccaagaccaaggtgcgccacgcccattacaccatgccggttttcgcaaaagacggcagcgttatgggcttattttacatggtctccgatttaagcggcctttacggcgtggtagacgacgcccgggtcattatgacctacgccatggtggtggccatgggcattaccacccttctcgcctatattttggcccgctccatcaccttgcccattcgggatgtgacccgtcaggcacgggaaatggccgaggggaatttcaatcaaaaggtggaggttaagagcaacgacgaaatcggccggctggggagcatgtttaattaccttactacggaactggaagagaccatctcccgcatggattccgagcgttccaagctggacaccatgttccactacatgtccgaggggatcgtcgccgtggacgccatgggccgattggttcatgtgaatcccgtggcgaaggagattttggatctggccgacgacgccgtgggcgaagccttcgacatgaagcggctgaacattcaaaagattaattactacgacgccggctccttaacgggcctgagccaaatcgaaattaaaaacaagttctacaacattcgctacgccccctacaaaggggagagcaagcggcctcaggggattatcgccgtgttgcaggatattacggaagagcacaatttggacgtgctccggaaagatttcgtggccaatgtgggccacgagctgaagacgcccattaccaccattaaatcctacacggaaaccttgatgacggcatctttaaatcgagatgctcagctgcggtttttaggcattatcgaccgtgaaagcgaccgcatgactcacctggtcacggatttgttgcagctttccaatatggatgccaagcgcaccaattgggagcccgtgtccatggatgcctacgaggtggtgacggcgattttggaatccttgcagcccatgattaaggagcgccaccacaaggtgtatctggacattcccgtggacattcgccccttcttggcggacaagcacggggcctatcaggtcattaccaatattttgaccaatgcctttaagtacactacctacgcgggaaaaatcgaagtcatcggcagaaatttcggttctcgggtgcatatccagatcaaggacaacggcatcggcattgcccgcagcgatctggaacgaatttacgaacgcttttaccgcgtggaaaagggcaggagccgcgccatgggcggaagcggcctgggcctttccatcgccaaggacattatggaaaacatggggggccgcatccgcattaaaagcgagctcaatgtgggcacggaagtgcttttgagctttcccatggatcaggaggaagcatgaaagagcgacttaaaaccatcgtcctcgctgcccttctggtgctgaccttgattctcgccaggcaaatctggctctctccgccgccgacgggcaacaaactcattgccgcagcggatcccaagcttaccgatgccgtcatcgggcgcatgatgcctgcggccatggtggtgaatttcggcggcggcgcccacacgcagacggtgcagctgaaaaacctctggcccttttaccgcaacatcttaaagcaaagtttcgacggcaaagaagacattcactggaaaaaaatgccctacaaagactatttaaaatgccacgacaagccctcggtggttttcgaagtggccaagggcacttactccgatctctttaaaaacgtgtacaatcttcacgatttacacggcgagatttccgccatctatttttccgaatccgaaggcgtgattttcgaaacggaggaaggggccatgaagcccgagttcaccgtgaacctttcggacatcaacaaatacattcgctccctggagcgggagaccaatccgccctacagctccctttgggagcgctacggcattcagcgggcggtgtaccttcccgacgaaaagcccgtctttgaagggggcgtggtctatgaaaacgacctggcccacatgaaaaacacctacaaaagcgatttgcttcgccgcctcttgaaggccaacatcgacgaccttcacgaaatcggcgaagaggattccaccctctacgtctacggtcagcgcacggtgcgtttgtataataacggccttttggactacaaagaccagacggaagtggcgaaggaagtcatggatcccgccggtgccgtggagcgggcctttgagtttgtggcgaaaaacaccggcaccatcgacgacgtgtatttggaaaagctggagcccattacaaacggcggcgtccgcggctttcgcgtcaccatgaaccattcgcaaaaaggcttgcccgtctttcccgtgcaagacgaaaacaccgattacatcgtggtggatttgtttaacaatcaggtgaagcgcatgacctatctctaccgcaacaaggccgaggaagaaagcgaaagccacgccgtcaaaggcatggacttcgccgaggtggtggccatgcatccggagattttcggcgcgaaaggagaaggctacgatcaattactcaagcccttaaagcgggtgagcctttgctatttagacgacggcagggaagagaaaaaggccctcgtacccggctactacgttctttacggggagcaggtttatcttttcgacgccatgagcggggactgtgtaggcggtgagcgaccatgaattgggaaaaagcaaaaacggtgctcatcgtggcccttcttatcaccgatttgttccttgccggcgtcctctacgtggaccggatccgcgtggccccggcggaaaatgccgccgcctttcaccgggagacgaaatcccttttgaaagaggcgggcattaccgtggaggcggacattcccaaagacggatccaccttgcccgtcttggatgtggcctacgaaacggacacggaaaacaatttgaatcgccgcttttttagaggccatggccgcattgccgagggcgacgaccgacgccttgtgcttcgtacggcgcgggcgcagctgaaagtgctggacaagcggcggcttatttatgaagccgactccacctccaatgcctttttaagcgagaaggaggcggagaaaaaagccctggactttttagaggcccgggaatttcccaccgacgacctcgccctgttttacagtgaagcttcgggcaatcgcaggaagctcatgttcaccaagacctacaaaaacaattacgtggaatccgcctacacggaaatcgacctggtgggcgacaaggtggtgcgcatggaccggctctggatcgacgtcatcgacgaaaccgacgagcgggagccactgcccatggccacccaatccctgctccgccttctctcccacgacagcttaaagggcaggaccattaaaaaaatcgatccctgttactacttcaatcccgaagagcaaggcgccgtggaaaacctctcccacggcattcgcggctacgccaccgtggcatggcgcatggaacttgacggaggggaagaattggtactcttacactaaagaccgcgcgggcggtcttttttgttgcataaagaaaaaattcacccgataaaaagcgagcggccctgtggttcgaatgattgcacagcggtgaaatccatggcattttccgtgtaatcaccttgaagaaggcgtgtttgtgcaatgcattgtgaatagtgtatacaaaacagaaaaaagtgctgaaaacctgtaaatttgccgattttttttgctttaagctgttgtgtttttcacaaacagcgttataataaatgagtaagtagtagaagccttagtagatgattggcttttatttagacattaatttaaggaggtatttatgaccacatttctcatcggcctcgcgattttgctcatcggcggaatcgcctatggtcgtttcaccgagaaagtcttccaaccggatgacagagaaacgccggccattaagagtcaagacggcgtagactacgtccccatggacaaaaagaaaaacgcactaatcgaattattgaacatcgccggtacgggcccgatcttaggaccgatccaagggattttattcggacctttagcatttattatgattcccgtcggctgtgttctcggcggtgccgttcacgactacatgagcgggatgatttccctgcgctccgacggggcacaaatgccggcattgattaagcgcaatttaggcggcaaggtatactccgtctacaacattttcgtcatcgtactcatgattttagtcggtgccgtatttatttacacccccggggacttaatcgtcgccaatgtattgcatcaagaagccatcgcctcgaatcccgtggtatggattgtttatgcctgcattttcgcatactacatcattgcgacgctgttccccatcgacaagatcatcggccgcgtttacccgattttcggctgcatcctcttgctctcggccatcggcattttcttcggtctcttcttcaagggctatcaattagataatctgaccatgagcaactttggcagcatgcacccccaaggcacacccattctgcccgtcttcttcgtcaccgttgcttgcggtatcgtatcgggcttccactccacccaagcaaccttaatcggtcgctccgtgaagagtgaaagagaaggccgcttcgtcttctacgacatgatgatcttagaaggcttcatcgccatgatctgggccgctgccgctatgggtatttacaacaagggcatcgacgccgggttaatcggcaaacccgccgttatcggtctcgtcgccaacgacatgttaggttccatcggcggtttaattgccgttatcggcattatcgtgctccccattacttccggggatacggcccttcgttccgcccgcttaatgatcgccgatcacttgaacatttcccaaaaggatatgaaaaaccgcgtaagcctttccttggctattttcgccggcgtgctcgtgatcttgattttcgctaaattaagccccaacggcttcaatgttttatggcaatactttgcttgggcaaaccaaaccatcgcagtctttgcctttgccatgatcgccatttacctgaaacgccacggcagagcctatatcatctccttgattccgggaatgttctacacctatattattacgtcttacattttcggcgccaagatcggtttccgcctgccctacatggcagccaatgtcatcggcattgccattgcattggtctatggctacgttgtctccaaagaaggcggcaaacaaaaagacctcgccaatgcgtaaattttattgaaatgaaagagtgcggcatgctccgcgctctttttttgtgcaaatttttaaaaaatatcggcggcctcaccctttcgggcgatgtttcctttccgtgaaggtggtaatttatagacaagaaaattcccttgcacaaaaagaaggaggccgtttatgaaaaagaaattactgtggatcgtcctggcgatgatgatgctcgtagcccttcccgcctgcagcaaaaaatctgacacggatctggcgaaggaatcggtcgaaggctttatgaccgctctcggcgaaatgaaagtggatgacgcgcaaaaatacgtcttggaaaaggataaaggcgccttaaaagacgacgacttcatgaaggaaatggacaaaccggaaaataaatttttcgtagacattcttaaaagtgccaagtttgaatttaagtccggcgaaattaaagacggcgccgaagaaggcaaattggtttatgccattacggcgaaggacatgatgagcatcatttcccaatccatggatgacattctggcaggcaagtcggaagaagaaatcatggccggaatcgacgtatcgaagatggaagaaaagacgaaagatgtggaaatcgaagtgaagaaggaaggcgacagctggaaggttgccgatcctgaaaccattatgatggaaatgtccggcgtcggcggcatgggcgatttaatggaaggcggagaataaataccatcccttgcatgaaaaaatgcatgaaaaaaaccgaggtgcatcctcggttttttgtgtgtaatcaatcgttttgccgctggggctcgtagtggggatagtatttccgcgtggagatgcgccggcgcatgtaatccagccagcggggaagggagcggtctttttcgtaccactgggtaaaggtgaagccgcctttcagagaggcttcgattaaatctcggtctttttcgctgccgtattttcttaagacggcgggatccacaaagagccagagcccgcgggcatcgtggtagtggcagggcgtggattcacaggcgatgagatcctgcaccgggtaggtcataaaattgcagccgccggcggtcatgtagtaggatgagcggccctggcgaatgttgatttcgaagaccttgtaggtattgtcccgcacgtcgtatttcaaatcgaaattggcgaagccgcggtagtcgatggcctttaaaaaggcttcgtactgatcgtaaagggcctgatcccccatggtcagaagggcattgtaattgccgatttcatagggcaaacattcgtctagaaggcatttgcccagacacatcatggtcaccgcaccgcgggtatccacataagcatttaatacatacatggccgaggagttgccgggaataaaatcctgggcgatgagatcccccttgtagccggcggcataaatggcatccaccacctgggccatttcctcggcgtcttcgattttgtaaaacttctttttcccctcgaaatgcagatgcacaaaggcgatgctgtcgttggccttcaggcccacggggtaggtgaggcccagatccaagttgtctttgttttcttccgtaataatcacggtcttcgggtaagggagcccgtattcctcgcaaatggcgtagaaatcttctttgttttccaacttttgttgaaggtcgtagtcgatgtaattaaagcggaagcggccgttcaactgatccttgtacttggcgatgagggcggtgtagccgtcggagcaggaagtgaggagcaggggtaggccctcgtccttgaaacgatcataaatggcatccatgacgggcataaaacccgcctccgtgtcgaatccttcgtgaatttccacatccacgattttcgatttccgcgtaaagcgcaggggcttgatgccgtaagcgtgggaatgtatgccgtaggcctcgtgaagggagcgagccacgccgtaggcattgttgtctgtgcctaaaataattgatataaattccattaaaccctctttctgccgcagcgggcgataatgacgtcgcctaagacttcggtggtgtccacgacccgcgaatggtcgatgccgatggtggaaagctccgtacaggcgagaatcaccacggcgtcattcgtgtacttggcgatgagttcgtccatgacggggaagcgggtctcgcccagctccttcacgtcgtagatcacccgagtaatctgcgcctgttcctcggcggtgggatagatgacggccaggtcgtgtgcctttgcgtagcgatcgtaaagctttgcggatcgggtgccttccgtggcgaagaccgccactttatccgctcccatggctttgcagcgagccaaggtttcgtcgatcatattgatgattttgccgtcggccatagcctccatggcttcgaaaaagtagtggcccgtgttgcagggaaaggcgatgaggggcaccttcagtgcgtttaaaatgtcgtagtcgccttttacggcgtcgagaaaatcctcgtctttgccgcggaggatcacctccgtgcgatcgggcagggtcgagtgatttaatatcaaggcgttaatatggtcttggtctttatgggcttcggtgtggcggacgatgtagtcgaagaggacggaagtggccaagggccccatgccgccgacgatgcctaattcatagttcatagtctcagatcctttatcctgttttctttattgtaccacaccaatccccgaggcgaatcaggtgccgcaaaaggttttgtagccgggaatggccggggcgccccttaaggccatctgctcctcgttgtgggcgtagggatcttccaaaagtgtcataaagtgaagcaggaagcttttatctcccgcctccgcttcctgaatggcccgctccaccaggtaattgcgggggaaaatggcgggattgtttgcgcggcgaatggtatcgcctgcatttcctgtggctgcgatgattttttcgtaaagggcggcgaaagcgggggaccaatccttgcgctcgtcgccgtaggtgaggcgcaggaaggattcgttgtagtccaattgctctttcatcaagaggtcaagccattcattaatcaatgcgtagaccgattcgtctgcatcatcaaagcccaagcgacgggccatgtagcggaaataggccttttggaaggtgtcgccgtagattttaagggcagccgtgattttttcatcccgggccttttcgtcgccgagaatgtcccctaaagcctcgcccagtttcgatagattgtacacgccgatttgcccctgattttcaaagcggtagcggccgaagtggtcgatggagctgaacaccgccttgggattgaaggtatccaaaaaggcgcaggggccgtagtcgatggtttcgccggaaatggtcatattgtccgtgttcatgaccccgtggacgaagcccagggccatccagcgggcgatgagatccgcctgccgctcggccacacgaacgagccacttccccccgcgatccggggcgaggagcagatccgggtcgtggcgcttaagagcgtagtctaaaagcacggccacgtcgccgccgatggaggcgagccactcgaaggtgcccacccgcaaatggctctcggccacccgcgttaaaatggcgcccggctcccgctctgtgcgctgcacgtattgccccgtactcaccacggccagggcccgtgtcgtgggcacgcccaagtggtacatggcctcgcttaaaatgtattcgcggagcatggggcccagggccgcccggccgtcgcccatgcgagagaaaggcgtctgccccgcccccttcagctgaatgtccacgcggcggccatcgggcgtgatctgctcgccgagaagaatggcccgcccgtcgcccagcatggccgggtagccgaactgatggcccatgtaggccatggcaagagaggcggccccttcgggcagggcattgccgcttaagaaagccaagcctttctcggaaaaaagggcctcgtcgtcgatgcccaagtcccgggccaaagcattgttcgtaataaaaaatgcgggatccgccaccggcgtcggctccacctttcggtaaaaccgccgcggcagccgcccgtaagaattgtcaaaattaaacatagcatcaccggtaaatagatacccaaagaaggggaaattacagggttgtggtataatgccatagacagaaaaggaggcattatggcgaaaaaatatgtagaaggcgaaatcattcagcggcatttccccaacaaatccgtggtggaaacggaagacggcacccgtgtcgtggtgaaaggcggtctgcccgggcaaaaagtgggcgtgcgcatcacgagaaaccgaaaggacaacaaaaagggaaaaatcgtggagcttttggccccctcacccatggaagaggcgcccgattgccctcatgcggccatttgcggcggctgcacctaccaaagcctgagctacgaaaaggaatcggccctgaaaaaagccatgatcgacgatctctacggcagggatgtgccctacacgccggcgcccaaggaataccactaccgcaacaaaatggaatacaccttcggcgatgcggaaaagggcggccccctcaccctgggcctgcaccacaaaaagggcttttacgacatcgtctccaccgcaggttgcctcctggtgccggaagacatggaaaccattcgcggggccgtggaaggctatttccgcgagctgaacacccccttttaccaccgcatgaagcacgaaggtaccctgcgctttctcgtcgtgcgacacgcccgggccacggacagctatttggtgaacctggtcacctcctccgatgaggtggacgaggtggcctttgtggatttccttcgtggtttgaagctaaaaggcaccgtggcaagcatttaccgcaccatcaccgacgactgggccgacgccattaagcccgaagaggtgcgccacctttttggcgaggaagtcatcggcgaagagcttctggaccttcacttcgacatcgggcccttttccttctttcagcccaatcccgacacggccacgttgatttacgaaaaagcccgggctttggcggcggaagaaaaaggcgtggtcttcgacctttattccggcaccggcactatcggccaggtgctggccaaggcggcgaaaaaagtggtgggcatcgaaatcgttgaatccgccgtggaagatgccaatcgctccgccgcgcgtaatggcatcgacaacgcccgcttcattgccggcgacgtgctggagatgatcgacaccgtggatgaggcctgcgaccttctcgtcgtggatccgcctcgcgacggcatccacccgaaagccatcgataagctggccgccctcggcgcgggacgcatcctctacatcagctgcaatcccgtaacccaagtaagagacatcgaaatacttgaggcgaaggggtataaggtgcaacatttagaggccgtggaccaattccccaggacggcgcactgcgaggcgatttgtctgctgtcacgaaaataagatttaatagagagcgtgtaaaatgccatgataactgatagcttctaaaatagagattagaaatacatgaagcgctagatcaaatgacgaggaaaggaatatggaaagaaatattatagataaaatatgggtagatgcaaaaatttttgaaaacaatacagtcagtagtattaaaaacatgagtagaattaatggattaattaatgcttataaaatttgggaagaagcaaataatacgatactgaattgcaagggaaatgaagaaaagttaaatcaaggatttttatctttaaacaaagtataaatttctaattatctttttatattttcttaaatgctcgtaaagccttattctatgtgctttcgagtatttttactgtaggaagatacttcacgtttctttgcatatttcctcatgtcttagctgtcagaagtggtaaataagtagtaaattcatttgtactactaagcaacaagacgctcctgttgcttctctttattcaagcgtttcatttctgccattgcagaatcgaatgttgcatgtgcgtaatagttcagcgtcatggctatattagcatgtcccataatgtactgtaatgcctttggattcattcctgcatttgcatagttggtacagaatgtatgtcgcaaactatgtggagtgatgtgtggcaatttatcctcgttatacttattgtatttcttaacaagacctttcatcatgccgttgtaatcacttgccacttttggatagttctttctattaagaaagaggaaatcactatatccatcaatctcaacacgcttatcattctttcgattcgctaacactcgcttaaatgcttgataggcttcttcaaccataggaacttgacgttcgccacttttggtctttggtgtttcaatgtagtacccaatttcagtatctctcaatagctgatggtctatattgacaagacgattctcaaaatctaaatctggaagtgtcaaaccaccaaactctgaaatacgaagacctgtttttaagagtatcagaatttcatcataatttttgctgtaggttttatcagcttttgcaaaggctaacagtttttcttcctgttcttctgttagtacggtcttagggacagtatcatcatcaagaactgctttcagttgaaagtcaaatggattcttccgaacacaatcatcttgtatagcaatatagaatgaagcctttaaagaacgtttgtagttattgatggtttgataagcataaccattttcactcattctaatagcccattctttagcgtctgatggcttaatactgtcaatacttcttacacctaacttgtctttcttcaaaatatccataagatatttgcgtccagtttcagtgttttttctaacctttggtctttgagcgttctgttttgcgtaaagctggcagagtgtcattttctttcctacaacatcaataccatcatgaatgtctttctgtaactctgcgattttctctctaagtgagatacaatcacgctttcctgctggtactcggtctgtagccacaagtttccacgagtaaacaaattgcggttctccaaatgaatctacatatttatataagtatcttccgtcttttcgttggctctccccagtctttaaaatgcgacctttattgtcacgtcttttctctgacatggctttcgctcctttccaaaatggaaagagccttgatacgacttaatgctattttatcatatccaagaccctttggcgacgctagattgcgtccaatttatcaataattttttcaaactgttttcgctttatctgaatacgattgccattcataatcagccaatcagcatttttattttcatctgccaaacgacggagcttattttcgccaatacggaaatacttagacgcttcttcaatggtcagggtataacgctcccagataggaatatctgtctgcttcataaaatcctcctttcccaatcacacgttagatttcataaaagtagttttacaagcaatcgaacagctttagcaaagctcacgggagttccacccttgcacggttctcgtccaactgtactcattgcctgcgacgcttttaacgctcggactatgacgatacaggagtatcattattacgataagaatgtcttcgctggcaatcctgctaaagattacttctcggatcactgacatgaatcgctcgctatctttacagggcaggtcatggcggtcagctccgttggctcttttcttatcgaaatgtattcgactgctgttattcagttttcaaagaacagatggcttgtcagcctatcaaaacatactgaaagacaatatgctttgatggaataacaaacctccccaatcgggaagtatggaaagctcgtccgcacttccacgaaaagagagataaatcggtgctactcaatctcaaatgacaggatttttgtaatcaacctggtttccattcgtccacgtaagacctcatcaacgaccatactttgattgccatattcatctttcatcaaccgtagagagcgtttagcaatgtaccctctgtaataatgtagaatctggttaatcgcttctgtatcgccatcacaagcctttacaatcaatgggaatggaattctggaatattcttttctcattcttcgttttcctcctccataaacttcttgattaaggctagtccactggttctatgccgatagacagtagaacggttcaatttcaacaggtctgcaatttctgaatcgctcatgtccataaagtaaaacagcagtagaatttcacgtttcttgtctggcaactcacgtaatgcttcactcaacaaatcattttcaacgcctactgataacccattgagtgtaaaaatctgaaagtcagttgaatagttatctgttgtcgcaaactggctaacaagataatcgccaacatccgaaaaggacacctcacgctttgcaatccttgaaagataaagcatataattctttcgctcgtcttccatagcacgtttacagatatagtcaaactgattttctattgtggtctgaaaagaagatggtttcatgtttctcaccccctttctgtctaggaaaggaagtgagccttgctcgtttatctcctttcactcttagtcccaatgtgaaagggggatttgttgcattactgataaataaactttgtaaaaaagttctgaatagccaaaaaagcatataaacagatttatttctctgtttacatgcttctgttattctatctatatgatttataaaaccacattggtggacgtacttatctattgcagatagacgactttttttgacaagaacccaatgtaaggaaatttattgtatatgatgtacttcatggcgacgttgacctccaacaaaccgccatttggaagtaatatacaatattttaacagcgtaaatagcactaccatataacggttttttttattggcgtttagtagtgctttttattaaatataaacctataaaccatataacacgtttttctatacctgtttttaattcagtaggaacaataaaatgtatagaggtggtctactatgcgtaaaaaagaagataaatatgattttagagcctttggtttagccattaaagaagctcgattgaaacgaggtttaactcgtgaacaagtgggagcattgattgaaattgacccacggtacttaactaatattgaaaataaagggcaacaccccagcatacaagttctttatgaccttgtatcgttacttcatgtttccgttgatgaatttttcttacctgctaataacttggtaaaaagcacccgacgattacagatagagaaatacatggatagctttacagacaaagaactatccttaatggaatctttagccagcggtatcaacgaagcaagaaacatcgaagactaattaaaagaatccatacataacggaaagagccgataaaatgagattgtattaatctcattttatcggctctgcgtctttgcgtctggctctgtaatcacagttactttgaactgctttatttcaattaaattttcttgtctgcatttcggacaatagagggggaatttttttaattcagtatcttcccttatctttaatcgtgttttatttccacatacaggacacaatatccacttgtagtttataataactatctcctcctttacactttaattcaaatctttattaaaaaatatttcatcttatttaacaagaaaccatatttatataacaacataaaatacactaagttattttattgaacatatatcgtactttatctatccgactatttggacgacggggctggcaaacaggttcaccggtagtaacatggtacccttttaactctgttaaacaaacactacgtccatttgtaaagaaagttaaatcactacgatattcttgaatacaccgagcagggatttctccactaagaatgacctcattatttttcaattgagtgtctacgatgttcgcacaatatttaggagcatcgttgtatgctcgtgaaagatattcctgtggcgcataaattttaaaactaagatatggctctaacaattctgttccagctttttttaagacttgttccaatacaataggagcaagcatccgaaaatctgctggggtactaacagggctatagtataagccatacttaaaacagattttacagtccgtcacattccaaccatataatccttgttcgcaaccatagcgtatcccttccataactgcattttgaaatgattgatttaagtatccaagagaaaccgagctctcatactgcattccacttcccaacggaagcggtgatacagataaaccaatggaagcccagaaaggatttggcggcacttcgatgtgaatggtatattctgcattttttaacggtctctccatataaatgactgtaggctcttttagttctatctccacatgatacttttcttgcaacagtgcactaatcacttccatttgtactttccctaagaaagaaagtataatttcatgtgtcgtagaatccacgtaatatcgtagaagcggatcactatctgagatttccaaaagggcatcaagcaacatttctctctgttcaggtttactcggttcaacagttgtttgtagtagagggtgcggattttcaatcttttttctctgtggcaatagttttgtatctccaagaacactatttaacttcaaaaactcattttgcaaaataacaatttctccagaataagctctatcaatcttacataattcaccatttattgaagtatacatttctgtaacttttattttttctttttctgatactctaaccgaatctcgtaaatgtagtactccactataaaggcgtatatatgcaagacgttgtcttttttttgtatattcaattttgaaaacatttccgcaaagttcagacggacctcgatgtgttgatgaataaaatttattcgtaatcacttctataaggttatcaatccctatattgttttttgcacttccgtgataaacagggaacagggaacaattatgaaatcttatgctttcctcttgttcgagttccaatgcttctaatgatttaccggacatatatttctctaaaaggtcatcgtttccctctattaccgtatcccattgttcagattcggtaaagttcgtcacacacatattaggatacagttctaccttctgtttgattacaatttcggcagaaagtttctctttaatatcctgataaaccgttgataaatcaattccattttggtcaatcttattgataaaaaagattgtgggaatccccattttcctaagtgcatgaaataatatacgagtttgtgcttgtacgccatcttttgcagaaatcagtagaattgccccatctaaaactgataatgaacgatatacttctgctaagaaatccatatgtcctggcgtgtctatgatgttcaccttcgtattttcccactgaaaagaggttattcctgtctgaattgtaattcctctctgacgttctaaaagcgtattatccgtcctcgttgtacctttgtccacgcttcctaattctgtaatcgctccactgttatataataagctttctgttaaggtagtttttcctgcatcaacatgagctaaaactccaatattaataattttcatgtgattttcctccattcaaaaacccaaaagggcataaaaatcccagtgataaatacttttatcactgggatttttatgcataaccataggtatacaaagcatacagatattctctggatactttagaatcacatgataaaggtattcttaaactgggtacaaaaaactaagccctcctaaaaaaggacatctaattatttgttcccgctatcaaattgacagtttatttaagaataccttgccgcatatttattaactccttttaaatagtcacttaaataatagcacgtaagagcatatttgtaaaggaatctccaattttttatcaaaaagagtacatgattacaaagtatctgtaatcatgtaccaatatttgttattttacaatcttccaattactcccgttcttttcaagtaccaaatcaaattgagatacctgcgttgctttggtctgctggtcgatatactccactgtcagcgataccgtgacttgattatccttacgattgtgaataggatttaccagttcttgaaagatgtactcttttccgattggttttaatatcccgtcattcacatagtaggaaagttcactggctgtcgctgtaggatagagcttgaagaacgtcgttaaaaactcattgatttcattggttgtaatggaatcaaccgtcccctcactttcaatggcttttggtttataacttgatttcttaggtatgttggtaatggtcggattcttaaccagtaccatatttccagaaccatctacatagacactcactatataagcagagtggacggtctttgtattttctccctctgtaatgagctggtctacactgtaggttacattaaactcattgtcgccagttggctctaccgtccatatctgaaatcctcttacagaagacgatacaggaatatctttgcgtactgtatcaacattgagagcttgaagttcatctgtcagatagccttttagactttccattcgattatcaatggacttatcggattgctcccatgaatagtagactttcgcaaagttctctacaaaattttctacatgatgagtatcaacgtattccttttctatgatagttgtttcgtgaatagtatgagtatctatagctgtaaagtgcttgaatatcgcaaagctgaaactaagccctaaaagtacccacaaggcaatcacaacctttttatgaggattgaccttatagacacgaggtttcttttcctttggtatctgtttttctttattctgattttttctaaatttcatcattaaatcttcctttctcattgtttgattcgtcctgctcccactaaatgctgttgccagtaggggcttgttaagtcggcataaccgattgggtcgcctgcatgaaacatacggttattgccaaggtatatcccaacatgagtaatataagagccagcgttataggtagaatgaaagaaaaccaaatcgccagcttgtgcttccgatagtgggatatgctgggtcacatcatattgctgttgtgcggttcgtggtaagttaattccagcttttccatacgtccattgtgtcagtccgctacaatcaaaagaagtagtcggggaagctccaccgtaaacgtatcgccagccctcatatttcagtgcttcgtccatgatggcttgtaccgtatcatcatcaaactctgttatgacaagatactgcgttaccagttgcacataaaacatattgccatagttgtatcgccagcccccattgataggtatggctatgggattggggtaagacactttttcgccacctgaatactcttttgagaaactttgagccagttcaaaggtatatttatttccacgattagccacataccctaagaaaccaccaccataattgtaggactggataaccgattctaaatctacactgagcctttcgctactggctaataattcactgaaatacttcacaccttgcttaatggattcttctgtactcaatgaattaggtggaagaccgagggattccgaggactgcataacatcttccgcagtaccgcccgattccacctgtataatcgcaagaagtatgttgacatattcttcaacgccatattctttggcatatttttctaccataggcttatgagccagcacttctgcggaaacattcacacctccataatgaatattggaaattccgctgtcctgttcatctgaaaataaaatggcaacaaacagaagcagtgagaagaccatcaagaataatccagaaccaccaatcactaaagttttcaacttcatggtttcttaccgactttcttaatggtggcggttttgattggtggtctacttcttgtattttgtagtggtactctttgaacagtagacggacgttcttttgtgattggacgttgtgaagttctatctgctgtagtggttgaagttgctggcttttgaacggttttttcttgaacggtattgccttggcgttccacttttggacttgaaaaatcggacttaactgctggacgctcttgtttggcttgttgagattccttatatgaagtctgaatattagactgttttgaggtctgttcatcatgatattgttcttgtcttgtagtcggtctttcatgaacagaagaagcaggctgttttttctgtttgacctgttccatttcagagcgacgcttcgcaatggtttttcgcctttgttcctgctgttccttgcgtccactggctctgtccgctttggtttgagaaatactactggttaaatcacggacattctcttttactttggattttccttgatatactgcatatcttgcattggtcggcaaatctttaacctgttctttcaaaccactagcagtgtctaccattctgtctttggtatcagctactgtaccgatggtttgaccgatacgttttccaagtgttgatttttcctttccgtctggtcgggagtgatctgcttgtgtccttgcagaactccccgaacccgactgtccttttttacctgtaacaatggcagacccagcccctagagtagtcatggaacgtccaagtttccgctgtagacggtgcatgtgagcgtgcataagcatacgaggttttctcatcacacgacttcccacactttgagaatcgttactctgtagagaaaacatactcattaaatcgcccagcttgaagtagattcctgcaaaggtcacaatctgtagaaaagcaatcaaaaagaacggataaccagccgataaggtatagagcatggttgaaatactaaatgctgtcgtaataatcaatgtgattccagctcgtgtcaaaatggtattaaagagctttgttatggctcgttttgacataccatcaaatgatggaatcatgcttaaaataaagctcacaggcagaaacatagcatagatgataaaaagtacctgcgagaaaatcatgattcctgttaataggaatacaaatatggaaatcccaatattgaagacaaataggaagaagactgtacctaaacggttaatggtctttgtaatggttagattggtattgcttctgtcttcaatttcttccgcaacaattttttctctgtcttcgccattgttggaatctgggctggtggagagcaggctttccacacggtcaataccgatactttcaatgtctgaactgttgtattgaagcagtagccacggttgctgaacctgtatggaaaacaggctatctctgattaagtccacgctgtccttgccttgactatcggaatggggcatgacaatcttcgtgccaagtgataaactggcattactgatgtctgatgaaaagtcattgatttttttaatgtagtcgggagcgtaggcaataaaggaagccgataggataaacaccagcacaaaattcataatggcatgaattgcctttgtggtttctctctttatcagtcccgtataggcaacataaaccccaagaaccaaaatcaagagtaagaggaatccaacatagaaaccctctgttgaaaatccgtttgcactcacaccagctaaggtctgcatattcttaccaatggaatctgctgtagcggaaatgaagtctaaggaataggcttcctgtactaagtaacctgtcgcattggaaacatacaaactgattgtccaaataaaattggtaatggcatatagtccatacatgacctgttttccaatcccgtccgaccagttccacggaagccagccccagctattatccacataaaaatccagttgatagttttcaagtgggtatcggctgtattcatttgccacattgaccgtatcatctaccaagcccgcagcttgaaccaccgttcccagcatggctaaaagaaaaatggcaatcacaagtgtgaaagccactgtcattgccactttacctagacgtttcagcgtccagtttgattttattctgtttactattgatggtttcacatttacacctcttttcgcacaggtggtctggtatcaaaggcatggagcagttcttcaaatacagggtggaactgtatcacaccgacacgaccatataaatcactgataaggcattgcccgttttccaaatcacgcaatcgcttctgattgttttcgtcctctgggtctacaccaaaaaaggctaaggtctttttaatctcgttaaggtcagtggaacgaaatgcaaattttaagccgaggttatttttcagtttttcatctaagaggtcgtctgtattttgggtcacgaaatataccccagcgttcatagcacgaccagcccgaaccagcttcatagatagtgtttttccttgtgctacctgtaaaaagctccatgcttcgtctaaatctacaatcttgaaaatgcttcggtctgtatggataaagtctaaagcaaaggtactaatgacaatcagcatagcaacggataaaagctccatagtggtatattcctcaaaggaagtttccttgtcgggaagtaccaagtccgcaacctgtataatgttcagttgtttttctaagctgatagactgctccacataaccattactgaataataaatgtgcaaagtcatagtctgtaaaactttcgatatggtcggctatactggtacttagtggcgtattctcaacccgtaattcctcaatcactttcatcaaccctcgtacttcactattggttactgcacgaatggcttttctaaggattgggaagcgttccccatcacgagaggaaatccccgtaaggaatgtcagaatatcaatagccagtgattcagaatctttgggatttttcataatcacataagggtcaagtaagcctttgtttttctcatcagaagtcagagtgacgatattgatttcatgggaaatctctggcaaggtttctttccatctgccacgttctgcttttgggtctacaatcactgcttgtgccccataaagcaccgcataatagacgataaggttattcgcaaaggatttaccaccacccagcgaaccaacaaaagccgacgctaacgcattggttactgaacccttaaccccttgactggcaagagcaggtttcagatagacattgcgtccagtatctaagctgtagccaacataaatcccctcattttcccccagcatttgagtagcaccaaaacctaaaccagcgaggaaatcagaggtcacgtattgaatataatcattcatataacgcttgctggcaggtaaaaattcttcatgtaagccgagcatatccccaaatggtcgtaccagttttacgcttaaatcgtcataaaaatctttcacttcattacaacgacgtttgagttcgtcaagatcatttgctgatacccttaccacataagacagcttgtacatagattccttgctttggtctaaattggtttccagctcattcacactttccagagcttccgccacattggagctggtttcattatcactttgccaagcgtggttatccaagtctttcagttctttctttttattgcggacagtagatagggctttacgattcgctacaatttccacattcattgacgtatcaatcgggaatgtaaattgctgttgctggtagtagaagatttcagaggacgggaagtccagttctccgacaatgctgttaatggtaaagtaagctacatagacggtttcatcttcctgctggattttcaaatatcgctgtttttcttccaccaaacagcgagtaggcttaatcaagtcatagtatttaatcagcgtttcattatccagctttttctttgatagatggtactcatactcttcataggcagtgcctgtctgtccgtaaaggtgttcaatcagatagccgaagtcgtccttatctaacctgcggattttgaaacgacgagagattttattttctaagagcttttccatcttctgaaaacgcaggatttcatcattactcatactaacaaaatcgcccatcagcttatggttcacatcatagacaaaatcagacaaagcattttttgcttcaacggtaagacttttcatagaaaactcctgatcgttgagaagcaacttaaagccgataaagaaacggtagttcacttgattttcgccaatcatggatattaaagcgtctgtctgttggtcgattttgtcataggcaaccgctttgagcttgccagtgacttcatttttggaacgctcttgtgcagaacgtatgctggattctgtactgatttgtaaagcatgaattttgccatcacgattttgtgcgataagctgtctgaaagaatcatgcacttgtattttctgttctggacttagaaatgagtaattgtaaggaacaagctcatagtaagcataacattccccgtctttattccagacgagattgttttcaatgtatttaattggatatgccataaaattcactcctaactgctgtaatggcttcttgtggctggtttctgccaagcgttactttttttcctgcataggtcagctttggtcgcagtgcataagcaatgacagacttcaaaaatccataaggctttttaccatcaaaagtttttgtagacataaaccatgtgaaagccacaggaatcccaaagtatttgagaaatgctccctctatcatggaaagagggggcaagttgccaagtatcatcactgcaaagagtgacacgacaaaccatgtcatttgcgtaaaggttatgggaaacggaagtctaaaatcattgatagaatacagtaccttttccacagaccagatactggtatagcttcgtattttcttcatgtaatcaatcctttcataaaaaataggggtagctgattgagccaccccgtaaaatagaaaatctgccagtagtaatgtaccgacagatttaatagacgatttcaaaaatcccatgattggttgagataaacgttcctgaaaggtctaaatcccgaccataggcttgataatcaatatagttttgaagactagctggtacttcgcctaaagcacccgtttcttcaatgtagtagcgtgccacgtcatacatatcatcacaatcggaatgaatgataatatcctcttgatgttcgcttagttcttcaatgcttgaaaaatgagtgagcagagcagatagctccgattgtaattcttcgggtaattccgataccatttcccatagtcgattgagttcgccaatggaagtgtattcgtcaaccgtaaagggtaactcgtagtcatgaatggcgtattcctcatattcatcattcaagccgattttctctttgacttcctcaaagtcaatgggaaaggtaaaccacgcaccgaccaattcgccctcattgtatttgcctaaattcgcaatatagacttgcatatcgtccatatattcacgtcctttctttgtagagattcaaaaatccctaccgcacttcgtttggtgtaccattcctttgcggaacataagaaaaccacttatattccacaaaagaacggttttatttaagcaccaataatgcgattgaatagctctagtaaaatgtcttttactccagcagcgttgaagactaagccaaccgcaataatcgcaataattaaaaagccaatcagtttgctaaactcacgcttgaagccaagatacaagccaatcacaacgattgctaaaagcaccagtgattgagcgtttgatagaaaccagttataaaggttttgtccaaaattcataaaaatgttctcctctctatattcaatgaatttgtatttgagttatttttttgttgttatcacgtcctgttcttttactgactgttgcttcaaaatctgcttgtgtcggtctgtcagtttcgcatggtcgagaatgtcttttacaacctgcgtctggttgatttcatcaagtttaatcgcaacctttaaggtcggggcaacttgatgagatagccagttcagcgtcctttggaaggagtaaggctctggttttgtggttagttttaatcgttcacgattgttcccaataaaccaagcccattcttcattcagtttccaatcagaacgaggtttggaatcgtctttatctacaaaacggatataccgattgataattttaaaggcggtatgctctggattgtcatagacgagtaaatcacggactgcataataggcacgctcatttttcaatcgaatctcaaaacggttttttacttctgcgtcttcaatgggaatatcatttttcttgtactgctcgtagtccttttcatagatacagaaataaacttcactttgtaatgaaccgatatagagggtgtttcccatacattccttttcctctttgcgtaccagttcgccactgcgatagcttttaaaactgcggaagacggagatacattcttcctgttggcacttttcagtgagtacagggatatttaaaatccctgtcttatcgttaatggcaaggtcaaggcgtttcatcacaccgccagccaccaaaacgtccataaagaactcataccagcttctttgttgtgccagaagatagctttcaaattgtctgcacccacgacctttcaattccaccagaactcctttgtccagttcatgggagcaaaggacgaatatgtcgcctaaagcataatgctctgaataagaatagaaaccatagtcctcatgaagaaaataggacagtttcagttgtaagatgttttcgaccacctgctgtacgtctgttgtcggaaagcgaattcttacataatcaaacagcatttcaaggggagcgtcgggattgaagcgttccagagcttcccaaagggactgctgtaaatcctctgatggcttgacttttcctgtttcaatatcgcttagatactgccttgtaataccagtcgcaacagctaaacggttttgagatagtccataagccaagcgtttttcttttaaatgctgtaaccaagtttgttcattcagtaaaaatccctccaatcaaaaaggcgtatgtcaacttttaaagcccatttgacatacgctgaaattttgtaaatcccttgtaaccaaaggattttctaatgtttttttgactgtttcctgtcgatttgtacccccctgttagatacggggggttaagtgctggcgtggctattgccacaccagccagcaagatcagtccacacctgcgacttccgcttcgcacgtcgcctgcgtggactgtctgctgttggataactttttaatttcctccaagaaatcatatccttttggtacaaggggagtataaaactctgatatgacacttgttcctacatcaacatagccacgacctttgattcgctttaagaagaaatccttttgtacgtcactgccaaacatcatgccatagcccatttcagacatacgacctaaagccactctgaaattaaactgatcacggattccgtcgcctaaatattttgcgtctggacgttgacaagccagtattagaaagaagccagcttgacgacctaacatgacaatctgtttcagcttattcataactgcggtgttttcttttgttcccagcatttccatgaaagcgacgtattcatcaaagattaagaagtgtgccgggagacctaagtaagcataatttttgccagtcttatagttcttcatctgcttcatttcctcactacgtttcatcatttcttcatagaatgtttcaatgcaagaaagcaagtcttcttttctatagtagacatttgccatcacagaacctaagtccgcaagatcagcatttttcgggtcaagaatatacagttttgaatctgtatgaagcaaggcttcaatcagtgtcagtataaagtaagttttaccgccacctgtaccaccagcaatcaacatatgagggagcttatcatattcccaccatacgtttttcattaagcgaagtttaccatctttagcttctacttcatcaatagaaatacgactggctatggtgtcatagagcaaagtatattccacataggaatcctttaactctttatccgtcagctcacagtacaagccactctctaatttcttttccaagtgtaagagttggtcttgatattttcccagcgtgatttccacccgtatctgtatcaagccatttttaagtcgataatacattttagggaagtaggttatcttttcctttgtacgaccagcactatctttaaagaaaccctctgttttgacctgttcagattcataccacttgttttcaagtatcatctttgccagtttttgacggtggtaaagttgtttaaccgtatcatagcgaacccgtttgaatacaaacgctaccagcaagcagataagaattgcgacactgaaactgataattaaatagggaatgtcaatcttatctgcttgtgataggttaaaatcctgccagttgatctgctggattgtcttcacatgaaacagtccgacaaccagcaggaaaacaggcaggagtgacgctatcgtaaaatgaaagactaaatctttaccagatgggcgaatccttttaccacgctgtttcatgcgaaaaagtctcctttctacctagcgactatttgtcttgtgtcggttctttctttgcttgtggttgagctttgaatgaactagaatcctttgtcagcacaatatcgtctgccttgatataccagtcaacatctgctccttgataggtggcagtagcaacggtgtccgcaatgggattgataagttccacccgtgcgttataatcaaactctttcaaaggcacgctggcaggaatacttacttgaatcatgcgtccttgtcctttggattttaagtcataggtacgttccttgatttcatctgaaaccgacccgtcttcattttggattctcacttcacgacgtagagcagagaatttcaattctccaaaagtcgtgtctttatctaatacaatgccatttgctaatctcatcatttttcctctctttctttattcttttatcatgtcgtcagcatgtaaaaggtaatttgtaaaaccacgagtgccgattttgtagccctctgcggtaatacgtggattgactaacttcacacgttcctcaaagccgaaatgtttttcgccagcttcagcaggaagcaccaccacaatatcatctgctctttgaacatcagaatagagattatagcttcttgataagacagttagccgtccgttgattcttcgctgaacgactttatcctcgccagcaaattctaaattgccgaatgttttttccatgttgggaatcacaaatttaagttccatatttttacctatcctttcttttttattggctgaatgaatgtttgatggtcttaaagagtggggaacgaccttttgattcttgattttttgttttcataagttcacttcctttcaaaatcgggtaaaaaaatagacacctcattttttgaagtgtctacctattaaatattcaaattttattggaagtatctttatatcttcacttttcaaggataaatcgtcgtatcaaagctcattcataagtagtaaattagtagtaaattgagtggttttgaccttgataaagtgtgataagtccagtttttatgcggataactagatttttatgctatttttattaaaaaaagagcatttaatgtaacttctatggaactaagaaaaaatttaggtatcgataagataaaatataaatctaaaaggaaagagaaagattttctaggagatttagagtactttgaaattataaaaactttgacattaaataagtatctaaatatcagaaacttaatcgagcatgaaaatcattcgccgccttcagttgaagactgcctatctttatctgaatatatatggaattatattagaagtacagtgaacattttcaatcagtttatagagactattagttttactagctcaagtaacagcaaaattctatttgaatatacaatagaagaaaagaaaaaggcgtatattcctcatttatatgtaactgcatttgtaggatcaagttacatttccttcgtccataaagaaaacgcgatgaaagtagaaaagataaagctattaaacaagttcgatctacagagagaaatagaatttgagaaaaaggcgggttttatagatgatttagagcatattgcatttaagggagaaattcttgatccaaatgtacttgctgggtatataaaagttttgacgttaccggagtatggggggttagatgacacatcaattcaatcgattttctcagaagtatgaaaaaaatgatttcgaaatctttttaacatccgctcacgattacgaagatgtcataaaagggaaaatggtattttttgatcatttatgttcagatggagtagaagctaaaaagcgaatagctacaataattttttatattttcaacatttatgatcttaaagatatgttgccattagcagattgtatttctggtgatttggaatatgtagcaagtgcttataatatttattgtaacgaattcggaggattaggatctattgccatattagatgaattcattctgacagatgacgtaaatgactataatgaagaaatacaaatgattaaatgttttttagcgaaaacaatagaaaaattacaaataataggtacagggacactactttttatgtccaaggctttaatttttagccttaataaatcagatagaattttcttaataaatgaactactcgatattagttgcataccaatataccaagatgagaaagatgtagttttagctagaaaccttgactattcagtatagtttaattaacattgattaacaccatatgtaggggctaaataaagttaataatggaactgacacataaattgttaaaagggaaaaatatttcgtgattctaaatatcttaagtggcaccattacgtaagaattattatatttgcagataataaagttaaaaatgatttattggaaaatattggaagtttttaggttgaatgtaagtggagtatatatatgactaaagaaatgaaaacatcgaaagaagaaatatgtgagtatcggttttctagaattgatgaaagcgacttaagtgtggatgcatcggaagcactagaaagatgctggagatgtggatctaagagaagccttgagagatgtcatataattccaagatccttgggtggtgaagatgttccatcgaattatgtgttactttgcgaaagatgtcatttagaaaatcctaatgtttatgatcctgaaattatgtgggattggcttaaagcatataaagaaaattattatgatacgttttggataaatcgagcattagaggaatatgaaaaaatttacaaaagaaagtttaaagatgatattgccccatttaatcaatatttaacagatgaagtagccaaagaatttttagacaaagaaatggataattatgctacacaccattttgggcaagcatatttaaattctgcaacgatagctggtttaatgagaattttaattaagaaattaataagaaaatatgatgttaatatttaaaggatgaaattaatttttataaaatacagtataaaaacgactataggggggtaaaaataagttacaagtctgggtttaagttaaatttgataaacagagaaggaacaatggcaaaaacaaacctatatgtgagtttgaaaaaattgacaaatcgcggtaattactgtattataataaataacagtacccgacacgcctcttaacaatgcggaccaagtcgggtcttttgattataaggagaaataaagtgaagaagtcccaccaagctccaatagatttaaacgagcaaattgaaaacttaatatctttaggtttagaaatagaagataaaggttatgcaaaaagtgtgcttaacaaagtatcttattataggattgtcaaggcttatagtataactttaaaagaaaatggaaagtacatagaaggaaccacttttaaagatatagttgacctatatttatttgatatggaacttagacatattttgttttcgttaatagagcatatagaagtttatttaagagctgtaattactaattacttttcattaaaatatgggaattttggatataaagatttaagtaactataagaaaaagaattttcagaagagtaccctaaaggaattagaaagagaaataaaaagaaataagaaatcaccatttatacataacttcgaaaaaaattatgaaggcggagagattccattctatgctgcaatagaggtagcaagttttggtacactttctaaaatgtacaagaatatggagaatgaagataagaaagaaattgccaaagaattcgaggttgactatatttatttagaatcttggattgaaaacttatcttatgtaagaaatatatgtgctcattatggacgattatatggtgcgaaactgacaaaaactccaaagctatatagagaatatttaagacaaggcatatctaataatactatctttgctagtattattaatctgaagatactgtctaatcaagagtattttgagaaattttatagtgacttattagaaataattaataaatatccaacagtagaattgaagcacttagggtttatagagacttgggaaagcattttttaatgatttcagaataagccaaaagaataattacttaaaaacagcttcaagtgagctgttttttacataatacaggatggtataataaaatcagcaaaaatagtaatggaggtgattttttgacaggtatggaaaaaattatagatttaatcaacttaaaacaagaaggcagttattgggattttaagaaagaatggtatagatctgataataaaggtaaacaagatttacttcatgatgttatttgtatgtctaataatttggaaagtaaggatgcgtttataataattggagtcgatgaagatgataactataacattagagatgtaagtgaagatgaaggaagaagaaatacacaaaatatcgttgattttctaaaagataagaaatttgctgggggtttaagaccaactgtatatgtaaaaagctatcaaattttaggtaaaacaattgatgtaatagcgatattgaatgacaataacacaccatattatttgacagataactttcagggaattagagcaaattacatttatacgagaattcaagatactaatacacctatagatagatcagcagatttagataaagttgaatttttatggaagaagagattcggattaactcaatctgtattagagagattagagatttatcttgaagactatgaaaattggaatgatggtccatatggtgagatgcagaagtattataagtattttccagaattcactatagaatatgaaagcgctagagaagaaagagatggatatagatattatcttttttctcaaacagattcaaggccacattggtatgatataaaatttaaatatcatcagacattattgaaagaattaggtggagttgctttagatggaggtaggtacttcacgccttgccctgaaatagatggaatcacattagacaaaaacaatagctttagttgggatttttcatatagatattttacgaagggtacttttctttacaaattaaatcagtttttctttttccaagaaaccttcagtgatgagttctcaagacaggaattctttgaagtaatactattatttcaatcggaagaagaacgtatggaatttaaagaatttattaggaataattggtataagagaaacgaatatttaaaacatgtacatatgccaaatattccgaattttcctcagtacaaagagggagcatttgttgaagaatatgaaaacgcattggttttaaatataatgttaaaagaatttagaaatagcttagaataaatatgttccctcatacgaggcttttgagaaatcttaaattttattcatactgaccactcgagccatgctgaagccctaaccctcttggtacgagattcgcaaagcgaatcgaagtagcaatagaggtaggtctcatgccaagaatctccaagagaagcgcccgcaagggtgattcgattggcaagattcgacggccgagagtgttgttttgatgttaagaaaataaaataagagactctaagactgttgaaatcaatggcttttaggatttttaaagagatcttaaaagccattttttttgataaataccttgtaggaacatatcgatggtaaaaatcgtaggggtgtgtagacaggatagatatttataaggagagtggagaagagaaactgaaagtaatatttaagtcaggaattgaaattgatatcaacaagtagcagatccgtaaagggtctgcttttacttataatggtaatggtgttaaactaaattgagtgtatttttgtacttataatgtataatctaacatagatttaatgattttcaggagattttatatgaacaagatattactattagaagatgacaagagccttatttatggtttgtcattttcttttaagaagcaagggtttaatgctgatatagctagaactataagcgaagctttagatttatggtcaaaaaacaaatatgaattattaattttagatgtatatcttcctgatggatcagggtttgaattttgcagaaaagtcagagaaaactctgatgtacctattatttttctaacagcctctgacgaagaaacaagtgtaattatgggtctggatattggtggagatgactatataactaagccatttagattaagtattttaatctcaagaataaatgcacttcttaggagaacagaaaaatataataaccaaaatatcgaatcaaatggtataaaaattcatttatcagaaagtgttgcttataaaaatggtcacgctttagatctaacgagtggtgaatataaacttctttgtttattaatgaaaaatcctgatattgtcctatctaaagatcaaattttagagaaattatgggatattaatgataattatatagacaataattccgtaactgtatatattcgcagacttagagtgaaaattgaagacaatcctagccatcccaaaatgatacaaactattagaggtctgggatataagtggaacgtttcttgttgaggtaaacaatgatgtcagtattttcagatgaaaacaataaaagatatttcaaacatatctttacagttaatatcttattcgccttattaattcaaatatttacttggaaagagttcaaaactatttctactccttcaatttttataagtcttatttttatttttttgacacctggtatattttatctttatttaaaacgccaagaagaaattatagaaaatgcagaagcacaaatcaatatgtatcttgaaggcaatcataatgttcagattgattctgacaaagaagggacaatttacaggttatttaattccataaatcagatggcttcaatattaaatgcccgagccaagaatgaaacgaaagagaagaaatttctaagagatattatatctgatatatctcatcaactaaagacaccattagcagctttaaacatatataatgaacttatttttaatgaggttgataaagattatccaattaaagatttgtgtgaagcgtcagaccatgagcttaatcgaatgaatacattaatacaaaaccttttgaagttagctaagtttgatgcaggtgtgattgttcttgaaaaattgaatgaaaatgtgtatgcaatgattaaagacgtagaactccactttacataccgtgcgaaaagtgaaaaaaaacatctacaagtttctggagatgaaaaaataaatcttacttgtgatagagattggctattggaagcaataaataatattgtgaaaaatgcttttgatcataccaaaagcggtgatgtaattaaaattgaatgggaacaattctcttctattttacagataaaaattacagataatggctttggtatacatgaggatgatctttatcatattttcaagcgtttctatagaagtagacatttaacagattcgcaagggataggcttaggactacccttagcaaagtctatcatcgaaggacatggaggcacaattgaagtttctagtgaattaggttatgggactaattttatattaacttttagaaatcctacaaaattgtaggattttagtaatttaattgtaggaatggagtgttattctttaataaatagaataagatcgaggtgttttatgagtttattagaagttaaatctgtttcaaaaatatatggaaaaggcgacaatgcagtgcatgctttaaaagatattaaattttctgtagataaaggagaatatatagctatagtaggagagtcaggttctgggaaaagcaccctcctaaatataataggtgcgctagatacacctactgatggtaaggttattattaataataaaagtttgttttcaatgaaagatagcgagcttacagtatttcgtcgcagaaatataggttttatttttcagggatttaatttgattccagagttgactgtggaacaaaacataatctttccagttttattggattacaagaaaccagatagaaaatatcttgaagaactattaaatatattaggattactagagagaaagaatcacttgccaagtgaactttctggtggtcagcaacagagggttgctataggtagagcgcttataacaaagccttctctaattctagcagatgaaccaacgggaaacctagattctaaaaatagttcagaggttatcagtttactaaaagaatcttcacagaaatatgagcaaactataattatgattacacatagccgttcgatagctcaagcagcagatagagttttaagagtttcagatggaatactagttgatcagggaagtgctacaaatgaaaagctatcttagtttaattccaatatcagctaaaattcgtaaaaaacagaatcatttaactataatgtgcatagctatttcagtatttttggtaacagcaatttttagtatggctgaaattggcttacgaatggaaattgatagattgaagttaaagcatactggttttagtttcaatgatgtattaaaaagtaacttggggcaaactttaattcctgtagcgataatattatttattctaatacttgtagctgccgctttaatgatttctggaagtattaacaatagtattgctcaaagaacaaagttttttgggatgatgcgttgccttggtatgagcaaaggtcagattaaaaagtttgtaaggttagagtcactaaattggtgcaaaacagctattcctattggtacgttaataggtgttgtttcaacttggattctttgtggtggactaagatatatagttggggaagaattttctaacatacctatttttacaataagtgtaactggtattctagcaggtgttctggtaggacttgcaagtgttttaattgccgcacaaaaacctgcgaaagaagcctctaagatttctccaattgcggctctttctggaaatacagaatctaatataggaaataaacaattagtaaataatagattctttcatattgaaaaatcactaggaataaatcatgctatagaaaataaaaagaatttatttctaatgtcagcttcctttgcattaagtattatcttgtttctaacatttatagttttcggacaatttgtaaattatataatgccacaatcttctgccagagcagatatagagattacaagtaaggatatttcaaataatattgatccaaatttgttgaataaattaaaagaagtagatggagtcaaaaatgtatatggtagaagaagcgcttttgatgtaaatgcaattttagaatctgaatctaaccgtagagaaaaaatagatattatctcatatgatgattttgatttaaaaagtctaaaaaaagataaagccctaaagagaaaaagtgatttatcgaatgtatttggcaatagccattatgttttatccacttgggatagagatagcaataataaaattggagataaaataaaaattaaaggagaagattttgaaatagctggactattgaaatatgatccatttagtagcgatggtgaaactggaggtaaaactacaataataacttcaaatgaaacattcaaacagataacaaatgaaaatggatataacttagtcatgttacagactgatgagaatttttcaaatgaaagtataaatgaagttcaaaagattatggggaacaagaatacaataaacgatcgtagagaacaaaagacaacaggaacatatatggcatttatgttttttgtatatggtttcatagcgattatcggtcttgtaagtctattaaatagtatcaacagcatatccataagcgtatcatcaaaaataaaacaatatggaatgatgcgtgcagttggtatggacaaacttcaaattaagcgaatgattaaagttgaatcagcaacctatggtttctttggctgttttatagggattattggtggtgttttgctgaataaaattatatttacaaaattgatagaaaatcatttttcctatgccatttggcagtttccaattttgccaacgatgatttcgataggatttatattgatttcagtaattctttcaacttataaacctattaagagaattaataagatgtccataactgccaatataaatgaattgtaaattattctttcttatagctatatttgttggtcatcttagtagtattataattagttcaattagaggttttaaacagctcttttatgggctgttttttcttagttctaaaatgatataataattataagatgtttatttattgacatattcccacatacgaggcttttgagaaatattaaaatttatccatactgaccactcaagccatgttgagacggtagctctgttgtccaaactaaatacagaacatcatttagatatagaaataggggaagatgaattatctgaaattgacttttcaaaagacgcaacttatggagaaattaaaaagtatgtgttagataaatacggactaaaagtttcaagcctatatattgcacaaataaaaaggaaacatggtctaatagagagagaaaattataattttagtaagaaagaaaatcaaagagtgccaaattgcccagaagaaaaagaaaaagcaatcgaagatgctttagagcattttggaatgatttaaataatatctaagattgaaaattttaaaatgaagacttaaaaactttaagattaaaaagatatgtacttcttatataacctaagaagattaattgaaaatcaggggaacgatgatggtaaaataaaaaattttaacaactaaagaagaattaggcattattgccaaagaggtttttatgaagttaaaaatactgaaaaagacttgttagaattgaaaattttagatcattgtgcagggtttcgtgtcataatagtgatagaggcaaatagttatgtaaatataaagagttcaagacttctaccaaagtttaaaactcaaaaaataaatagttggtgtgctgcttagagtaaccattttgataatgtggatgcgaaacaaaaagagataatcagacttcgtaaaaaattgaaacaggttgaaatggagaatgatattttaaagcaagctgcactactgttaggcaaaaaatagacctcattatctcgaaccgagataaatatagcattagtgcaatgtgtagactacttggggtcacaagaagtttagtctattatcatttgaacaaagaaaaagatgtgaaattagatgaagatgaaaaactaatagaagaaataaaagaaatattcagaagaagtagaaacaactatggaacacgcaaaataaaaaaaactagggaaaattggatataaaatatcgagaagaaaaataggccgaataatgaagaaaaatggcctagtctcaaactatacagtagcacaatataaagtaataagatccaaatgcaacgaagaagacatccctaaccttttaaatagataatttgacaatagagactatttagaagcaatagtaagcgagctaacatatgtaagagtaggaaaaacatggaattatatatgttttaatagacttaaacagccgtgaaataataggatactcatcaggtaaaaacaaagatgcaaatctagtagcagaagcattttactcaataaggcagccactaaatcgtataaaaatatttcacacagacagaggaagagaatttaaaaatataaaaatagaagaaatattaaaggtatttgggataaaaagatcgctaagtaaaaaaggaagcccatatgataacgcagtaagcgaagcagtcaataaagtaatgaagacagaattcatatatcaggagaactttactaatttccaagaacttaatctaaaattagcagaatacgtatattggtataataacctaagaattcatggatctttaggatataaaacaccagtagaatatagaaaagcagaataaaaagctctggaagtttcataaattaaataaaatatatgaacagactgtcaagggcaaatttcaacgaaatttgggcgaagcctttacccttgattgtctgagaatatattttataatctaaagaaactttcaagcttgataatgttcggttataaattgtctaaaaaagggttgccattccatgtatttgggttcattagaagaatgccgagcaatgggtaacatgacgctgatgtgtttatacacaaaaaagctacacgtgcgttggctgacaacagggagctaagtaaattaacaccagctaaaatgtttgacgctattaataaatgacaagtatatgaaattggctttacctagtttaaaaaagaaattataatgaaaatatggaggctaagaatatgaagattaataatgaatgttgttgtggatgcaaaacagaaaagccggatcaaattaaagacaattgtcctgtatgtaataatgaagggatttccgttagtaaagtaactgttgaacatctagtggtagatgattatcgtaatgctgttaacggagatcaatataagatttgcatgaacgaggactgcgacgttgtttactataacttagataatgaaataaaattcttgaaagaccaagttagagttcctatctggtttaagaaagatgcagatcctaagtatgcttgttattgtagcgaagtcacagaaaatcaggtaattgaagcagttgtaaagcatggcgcgaaatccgtaaaagaagtaaatgccatcactggggcaatgaaaaattctaattgtaaagaaaacaatccgttgggagtttgttgtcataagattattcaggaagctatcgataaaggcttgaaaatgaaataattacagtcgatatgttcctacaaacgagagccaatctttgatatgtttccatctacgagcgtggatatgttccccataaccataggggttgaagctatagcgttgatacaaaagatgtaaataaggaagataccaagacgttttcatcagttttttcacccttagtaatgtaatctattgtcaaatttagagttgattttataggatgtatttttgtaattgccacactaatcatcagaactttcttttgatttattaagaagtagggaatggatctgccatatttctcttgacagtttttctatctgtttattcatttcttcaatttcatttttgtaaataatgccagttgtattagtagccttggcgatctggtttatattatttgttgcatttgagagtagccattgtaagtttctaaatggttctaaatctacaacataaatttctttctctaatacacatttcctaagaaagtgggacatagttttgcaatttgcaagtttcattttcttttcaaaaaattttttcttctttggttaattttatttctattccttcatttctaaatctatctgccattttattgtcctttataaaatatatttcggggtcttagggttctccctaacaaggttaaaattaaaaaaatggagcattccgtaaaggtctgctccattaatttttttgtaagtgtccgtacacttactgtgcttgctattaaagttataagcgtaaagcgtttattaagttttattaattataccgtatttaaataaattaattaagaagtatatggtagagtagagcaaaatttataatttgatcgatattgaaaatactttccaattaagctataataaaaaccgagggagtcctcggaaaaacaatcgaatgactggaggtattttttgaaagataaggaaataaaagttggtcaaataagaaaaaaagaaattcgagatgcagcaatgagatgttttttgaataagggatttcagaatacaacgatggaagatgtgattaaagaagttggcatgagcacaggtggcgtctatcatcattataaaagcacagctgaaatgcttaaagatttaatgcttgacggaaatcagtatagaaataatttaattgataattatttagaagctcacataggtcaagataaatatgaacagatgagtgaaattttagtggataaatgtctaccagatactgatattactaaggtttattctctattattacaatcaaaaaaatataatgaagaattagagaggatgtttcaagatttgaaaacagaaacagtaaatcaattagattcaatatctaataaattaggaattgattcaaagatttttgaagatggttttttagtaaattatataaatggaatgatattaagctcgcaagttcttaatgcaagagattcatatgatgagaataggaaatatctaaaagatacaattttaaattatattttagatttagaaaaaaatagataactaaggaggtttcagaaatgaataaaaaattagaagttagagatttaattaatgttggtctgtttgcggtacttgggtttatttttatgctaataggctcatttacagctatggttcctgttttgatgccaattgttccattagtacaggggattttagttggacctagtaacatgcttttttcaacaaaaattaagaagccaggaatgctttttattcaaacaatgctaatatctttagcttatgtcatcatgggtcatggtccatgggcacttttaacaggagcaattgcaggatttattggagaaataatattaaaatcaggctcttatgacagtaaaggaaaatctagattagcattttctttttcaagtctttgtactttaggaaactatgttccgattatcatctcaagaaatgagtatgtacaagagcttttaaatcaaggttataaacaagaatttattgacacgatgatgaaagttatgcctgattggattttaatagtcatggctattttaggatttattggtgcttttgtaggttgtagcttaggaattgtgtttttgaaaaaacatttttcaaaaattggtaagtaagaattagggagcaggttattagatatgataaggatagattttagagcaaaattatttttaatgttggttatttcttttataatgacaattggaaatattcaaagtctaaatcctatatattatgtattaatatgtatgctccctacttttttattatttttatctggacatataaaatctgggattaaagcaatcatatttttcataatattgaatattatagaaattaatattagggaattaaatgattccataatattatcacttatacacatagttataattataataaaaagagtttttgcacctatggttatgggaaattatataattttaacaactagtgtaggagaagcaatttgttcattaaaaaaggtgaagtgtcctgatcagatagccattcctgttgcggttatggttagatatttttatgcaacaagaattgagtatagacaaataaaacaagctgtttatttgagggatataagttttaagaaatttttaaagaatcctattttattaattgaatataggataatcccactattgatgaccctatcaaattctgctgatgaattgacggtagcttcattaactaagggtcttgctgtcaatcaaaatagatcaaatattagagaagcaaagttaacatttgctgactatttaattttttttgtttctattttagttttatttttttatataagaggtagaaaatatgcttaaaataagaaagcttgatttatcttttgatgatgaaaatatcttaaaaaatctaaattttgaatgtaaagctggtgaaattacagttattacaggacattctggatgtggaaaaagcacactattaaaagcaattaatggggtaatacctgaataccttgatgctaatattagtggagaaataaaatataacaacctagatttactaagtaaaaatatatttgaaagatcatgtattatttcaaatgtatttcaaaatccaaaatctcaattttactgtatgaattccactgaggagttagcctttcagctagaaaatagaaatactgacatgttagagataatcaatagaataaagaaatactcaaaactcttaaatatagaatacttattagacaaaaatatatttgatttatctggtggagaaaagcaaatgatagcacttgcagcttgtgcaatttctgaaaatgatattatcttattagatgaaccatcttcatcattagataatgaatctatagaaaggttaaaagaagccttagtgaaattaaaagaattaaataagataataattgttgtggaacatagattattttatttaaaagatataatggataggctctgcattattgataatgagtctttaaattcatacgaaaaagaagatttaaatgattataatttgaaagctattgcagaaggatatgaacttagaacatttaataaaatagagaaaagtgatttagagattaataaatattataaagtaaatttattggatgataaaaataattttagcaatggagatttatcgtgtcataatttcaagaaaaaatatgaaaagaataaaattattgacttcagtatttcctttaataagggagtaaattttatcattggaaaaaatggaatagggaaaagtactttcattaaattattgaccggtactacaaaaggtcacggagatgtatttgttaatcaaaaaaaagttacaaaacaaaataaagaaatttttatggtaatgcaagatcctagctcccagctttttacagaaagtgtattatcggaagtatcaacagtaagtgaagataaaagcctaaatgaaaaaatgttggaaaagatgggattattatcaaagcttgaaaaacatcctcaaagtttatcgggaggagagaagcaaagattgttgattgctatagcaaggcttagtagtaaacctattattatcttagatgagcctacaagtggattatgtaaaccacagatggatacattaattaatttcctacacgatatggagagagaaggaaaactcattataattattacacacgattatgagtttataaaaaactgtgggggtaatatttatgagttttcaaaataaaatattttagaatggaggagtgttgtggactatttaaaacgcatttgggaatatgcagaaacagagaaaaagtggattaaacttgctatttttctttctagtataggggttttatgtggaattatgccatatatttttgctagtagcattataaataatctaattcaagggaatcatgataccaaatattacatgttactatgtctatttatatttcttggatatagcttaaaatcaattttatattcatttgcactaaaaatttctcataaagcaaccttttcaattttaaagaacttaagaataagtatagctcaaaaacttcctagaatgcctttaggaaagattatagacacaagtagcggagaatttaaaacaaccattgttgaccaagtagaaaaaatggaaagaccattagctcatttgcttccagaaatgacagcaaatatattaggaccgctatttatcattatttatttattaatcattgattggagattggcaattctttctttagtttcaattccagttggtatgatgtttatgggtttaattatgaaagattacgcaagtgattatgctaaatctgttgaggtcaataccaatatgaataagtcaattgtcgaatatatcaatggaattgaggttataaaaacttttaatcagggtgagaattcctattctaaatatgagaatagtatttatgcaaatgctgaatatttttataaatggatgaagaagactcaattttctatgtcgttatctaaagcaatatcacctactactttgataacgatactgcctataggttttttgatgtatataggtggtagcctagaaattagtagttttataatggtcataatactttcattaggagtagcaggtcctttattagccgcaattaattttattgacagtttagcacaagtaggaacaacagttaatagaatagattctattttagcagctgatgaacagattcatagcgataatataacttattttgagaactatgaaattaatattaaggatttacattttgcatacgatgaaaacaaagaaattttaaagggcgtagatttatttgtagaagaaaatacagttaatgctttagttggaccttcaggttctgggaagtccactatagcaaagcttattgctgggtattgggatattagtgatggagtaattactattggagataaaaatatattagatattccacttagacaattatatgatttggtagcatttgtatctcaagacacttttctttttaatgatactgtgatggaaaatataagaatgggaaaggtaaatgctagtgatgatgaagtaatagaaatggcaaaagcttcgggttgtcatgaatttattatgtcattagaaaaaggatatcaaacgatagtaggttctgggggaagtaatttatctgggggagaaaggcaaagaattactatagctcgagctatgcttaaaaatgcaccaattcttatattagacgaagcaacagcttatatagatccggaaaatgaagttaagttacaagaatcaatttctaaattgatagaggggaaaactgttataattattgctcataggctatctactgtaactgatgtagataagatttttctagttgaagatggaaaaatatcttgtgccggtaatcatgaagaattactaaataaaagcaatacttataaagatatgtggagagcaaatctaaaaaaataaggagtgcaaaatgattagtggacttaaaaaaatttggaactttgcagatcttgagaaatctaatttaaatgtctctgtggtctttgagtttatttacgccatatttaatatgttacagattgtagcaatttacattgtattaaactccatcttttcagatgataaaaatatgaaagtttcattaatagttttaatattactaactttaagtattattggaagaagctattttaattctcttgcccaacttaaacaggtacacgcaggatattttatggtagctaataaaagagtagaaatagggaaacttttaaaaactgtacctatgggatattttaatagaaataatactgcttatataacaggaataactacttcagtattggatgatatagaaaatactgcaccatttattctagtaggtgtattaagtggtttaataaattcaatagtttttactttaatgatttttatttttgaatttaaactaggatgtattgtttttataggaacattattatacttgtgcgccgtatcctatatggaaaagaagtcaagagtcagttctgctgctaggcaaaaatctcaatcagaacttgtgcaaagaactctagaatatatacaagggctttttgtaataaaagcttttaatcttgaaggtataagagataaggaaataatatcgtctattactaagaatgaaaaagtaaacttagatatggaagaaagtcttactccctatatcataattcaagatattattatagctttctttagtgttattatgatagcaacatcattgcaattattttttaagggaagtatgaatatttcagacgggataatgggtataataatgtcctttctagcttttaatcatataaaatcaacgggtagcgtattagcaactttaagactagtaacaagttctattgaagaagttgaaaaaactatgagtatgcctaaaatcgatatagatggcaaaaacatagatccagaaaaatgtgatatagaatttaatgaagtttctttttcctacgaggataaaaaaatattaaaaaacatatcttgtaaaattaaagaaaatacaatgactgcaattgtaggactttcaggttcagggaaaacaactatgtgcaatctaatttccaggttttgggacgttgataaaggaagtataaagataggtggaatagatataagaaaatataagttagaatcacttatggaattaataagtacagttttccaagatgtatatctcttcgaagacactattgaaaacaatataaaatttggaaaacaaaatgcaagccatgaagaggttgtagaagctgcaaagaaggcaaggtgccatgaatttatagaagctttaccagaaggatatgacactatcatcggagaaggtggagcaagcctatctggtggagaaaaacaaagaatttccatagctagagccatgctaaaagatgcagatataattatctttgatgaggcaactgcaaatatagacccagaaaatgaagataagcttaaagaagctatagaacaacttacaaaaaataaaacagtcatcatgattgcccacagactaaaaaccataagaaatgcagaccaaattttagtcttaaaagatggagaaatagtagaacgtggaaatcacgaagaactgattaaaaataatggactttattctgatcttatcaacgcaaaagctaaggcagaatcatggaaattaaataattgataggaagaaagatttaaagtctttgaagaagaaaatttagattagaggatttatgcctaatagcataagtcctttttttatgttcaaattaatcattgaaactcaaaaatactatagaaaaataaaaattctgtttaccaaagaggacaaatttcactatataaagtgaggggtattttgtcatcagggaaggttcgggcaggagtacattttattttcgtgcggacagcaaatgattttcgtccaaaatgaagctaatttgaatgaaagcaggtacgagtggataaaaatgatttaggggttggcagaatgttgatattaaaaattatactaatgacgctcggcgttgcatttaccgtatttggatataagatttattttcgaaagaagtataatctaatcaacggctttgaagaagcttataaagcaggtagaaagacagaatcagatgccaagcgcgtgggattggtagaattaattattggaattagcctaattttatttggattctatgcgattattatcaaataacagactgagatttgtgaaagggtagtattaggtggctagtatttggtatgggtacaataatctttgcgaaattcaatggaatatggctatttaaggaaaatttgcaatactattttccggcaagtcgtatatagagcatggcaagaaaagtcttgtaggcagaattaggagcttagaagaatggagaagactttatgaggaagaatttaagcaagaagttatttttacttggacttgtactatttgtaatttcttacctacttccggtagacatatttcaaagctatacaaatctaaggccaaccgggcttacatcgatgtttgtctgcccaattgttggactaataggtttaatatttggggtaaaggaaaaggataagttgtttatggcgttaaatgtccttttaatcttattactgcctatagcaatggttgtaggtaatctaatagaagtaatgcaactaaaacaagaaaataataatctaaacagctcttttgagggctgtttttttctttctttgctccagaatgatataatgtattataagatacgtattgattaatatatggttctatgtcaaccattggggagtctagtgaaaactaggctcctttttgttttcctaaaagccatccatcaccgatcttttgaacaaacaaagagtaatttggttcgaaaatgatgaaagttttgcatcccaaaagccacacgcttcaccgtcttgatcttgttgtgcgttccttccacgtagccgttactccacgggtaatcaaagctgttggtgatctcctcgaaccagttgttgtaggcacgtaagcagtggcgccactcctttagcccgcttttctttgcctcttccatcc

SEQ ID NO: 41 - DNA, 47287 bp, Peptoniphilus rachelemmaiella
  source 1..47287: mol_type = genomic DNA
ccggcaatttcctactctcccaggtcgttaccaaccaagtaccatcggcgttaagaggcttaacttctgtgttcggcatgggtacaggtgtgtccctcttgctatcgtcaccggacgaaccaagtgcatatacaatctctttggtcaagtcttcgaccgattagtatctcttagctgcatacattgctgtacttccacctgagacctatctacctcgtaggctacaaggggtcttatcatatgagggaaatctcatctcgaggggggcttcgtgcttagatgctttcagcgcttatcccttccaaacttagctactcagctatgccattggcatgacaactgatgcaccagcggtttgtccatcccggtcctctcgtactaaggacagatcctctcaaatttcctacgcccacgacggatagggaccgaactgtctcacgacgttctgaacccagctcgcgtgcctctttaatgggcgaacagcccaacccttgggacatgcttcagccccaggatgagacgagccgacatcgaggtgccaaacctccccgtcgatgtggactcttgggggagataagcctgttatccccagggtagcttttatccgttgagcgatggcccttccacgcggtaccaccggatcactaagtcctgctttcgcatctgctccacttgtcggtgtcgcagttaagcttccttttgcctttgcactcttcgcacgatttccgtccgtgctgaggaaacctttgaacgcctccgttactttttgggaggcgaccgccccagtcaaactgcccaactgacagtgtccctcttccggattcacggaagtaggttagaattccagaatgaatagagtggtatcccaagggcgactcccgaaacactggcgtgcttcgttcttcgtctcccacctatcctgtacagtccattccgaaatccaatatcagcctgcagtaaagctccatggggtctttccgtcctgtcgtgggtaagcggcatctttaccgctactacaatttcaccggatcctttgttgagacagtgcccaaatcgttacacctttcgtgcgggtcggaacttacccgacaaggaatttcgctaccttaggaccgttatagttacggccgccgtttactggggcttcagttctaagcttcgcttgcgctaactttttcccttaaccttccagcaccgggcaggtgtcagcccctatacttcgtctttcgacttcgcagagacttgtgtttttggtaaacagtcgcttgggccttttcactgcggccatgtttccatggctccccttctcccgaagttacggggtcattttgccgagttccttaacaaaggtttttccgctcgtcttaggattctctcctcacctacctgtgtcggtttacggtacgggcgacaatacgcgaatagtggcttttcttggcagtatggattcggctccttctctacttattttcgatccgcatcacacgtcagacttcacgagaagcggatttgcctacttctcatccttggtgcttgcacgcctcaccaaccgggcgctacgcttatccttctgcgtccccacatcttcattgcgtttgccggtacaggaatctccacctgttgtccatcgactacgcctttcggcctcgccttaggtcccgacttaccctgagtggacgagccttcctcaggaaaccttgggttttcgacgggtgagattctcactcacctctcgctactcatgccagcattctctcttctgtacactccacaataccttacggtttttgcttcgtcgcgtacacaatgctcctctaccaatccttacggattccacggcttcggtatcgtgtttagccccggttatcttcggcgcagagtcacttgactagtgagctattacgcactctttcaatgtatggctgcttctaagccaacatcctagttgtctcagtaactccacatccttttccacttaacacgaattttgggaccttagccggtggtctgggctgtttccctttcgactatgaagctcatcccacatagtctgactccggaggatactgtcttcggtattcggagtttgataggtcgcggtaacttggtaaagtcccttgaccattcagtgctctacccccgagacattgccttccaggctagccctaaagctatttcgaggagaaccagctatctccgcgttcgtttggcttttcacccctatccacaggtcatccgataacttttaaacgttacccggttcgagcctccattgaattttacttcaacttcactctgcccatggatagatcacgcggtttcgggtctatgacctacaactcttcgccctgttcagactcgctttcgctgcggcttcgatgcataacatcttaaccttgctgaaaatcataactcgctggcccgttctacaaaaagtacacgatcgtggtacgaaaccactttcgctgcttgtaaacatccggtttcagattctatttcactcccctcccggggttcttttcacctttccctcacggtacttatgcactatcggtcaccaaggagtatttagccttagggggtggtccccctatattcccaccgggtttcacgtgccctgtggtactcgtttagagtagcataccttcacttcgcatacgggactgttacccactatggtcgattgttccaaatcgttctgctcgctacatatgccgtatctcaagttgggctctaccccgttcgctcgccgctacttggagtatcgaggtttctttcttttcctcggggtacttagatgtttcagttcccccggtattcctttcatacgctatgaatttacgcatgaatgctgagagtttgtctcagcgggtttccccattcggatatctgtggatcgatgtgtatttgccactccccacagcttttcgcagcttatcgcgtccttcatcggctcttggtgccaaggcatccaccggatgctctttctaacttgaccttacgatctattcgttgaaattgtaatcttaaatttaaatttgaagatttgatttttacgatgttctcgttttttgattgtatatgcaattttcttggttcaatgcgcatcatacgatgcggtggtggagatgaggagattcgaactcctgaccccctgcttgcaaggcaggtgctctcccaactgagctacacccccatatataattaaaggtataagagatttgtccatctttcgctctcccccgcaggggagtgcgcatttccttagaaaggaggtgatccagccgcaccttccgatacggctaccttgttacgacttcaccccagtcattaaccctaccttcgacagctgcctccttgcggttggctcgctggcttcgggtattgccaactcccatggtgtgacgggcggtgtgtacaagacccgggaacgcattcaccgcagcattctgatctgcgattactagcaactccgacttcatgcaggcgagttgcagcctgcaatccgaactgggatcggctttttgagattcgcttgcgatcgctcgttcgctgccctctgtaccgaccattgtagcacgtgtgtagcccaggacataaagggcatgatgatttgacgtcatccccaccttcctccgatttatcatcggcagtccctttagagttcccaccattacgtgctggcaactaaaagtaagggttgcgctcgttgcgggacttaacccaacatctcacgacacgagctgacgacaaccatgcaccacctgtattagcgtttccgaagaaaaaactttatctctaaagcgggcgctagtatttcaagtcctggtaaggttcttcgcgttgcttcgaattaaaccacatgctccgctgcttgtgcgggtccccgtcaattcctttgagtttcatgcttgcgcacgtactccccaggcggagtgcttattgtgttaacggcggcaccgaggtttgacccccgacacctagcactcatcgtttacggcgtggactaccagggtatctaatcctgtttgctacccacgctttcgttcctcagcgtcagttgaagtccagcaagtcgccttcgccaccggtattcctcctaatatctacgcattccaccgctacactaggaattccacttgcctctccttcactcaagcttgacagtttccgatgcttacgaaggttgagccttcgccttttacatcggacttgccatgccgcctgcgaaccctttacgcccagtaattccggacaacgctcgccccctacgtattaccgcggctgctggcacgtagttagccggggcttcctcctatggtaccgtcattatcttcccataggacagagctttacgattcgaaaaccttcatcgctcacgcggcgtcgctgcatcagggttgcccccattgtgcaagattccccactgctgcctcccgtaggagtttggaccgtgtctcagttccaatgtgaccgttcaccctctcaggccggttactgatcgtcgccttggtgggccgttaccccgccaaccagctaatcagacgcgaggccatctcttaccgctaacgctttgacttcatcatcatgagatgtcggagtcttatacggtattaatcccggtttcccgaggctatcccgttgtaagaggcaggttcctcacgcgttactcacccgttcgccgctaatccagaagttcgtcacccgaaggatcagaacgactttcatcgctcgacttgcatgtgttaggcgcgccgccagcgttcgtcctgagccaggatcaaactctcaataaaaactttgagtttgcttagctcggatccactgactgtgttccgctttaagcttatagattgttatggtttaatctcttataccatttaattaacttggttcagcgctgtgtctttcgaaacagcttatttagtatatctcgcagggaatgctttgtcaagaactttttaacattttgtaaaaattcttttccgcacgccttgcgcgacaacttttatatcatacctctcgagatctacactgtcaagatgtttttcaacttttttctcgacatctttctctctttcgaggcgactaatgtatattagcatcgaagacggcttctgtcaacagggatttttgtttttccgatactaacattcgggttattttgcttctattttctctggcaaattgcttttcttcagggaataatttcaattgaatagtaaatacttggtaaatattgtgacatcgggctttctttctgctaaaataaaggcgtagggaatcctacatccattcatctatgtctgatggtgctcctttgtttaatagagcgaaagacgcccctcttcggaggggcgtcttttttattgcttctttttattgaaagatttccattttttcgatgcggtcgaaggctttgtcgatttcatccacgccgacggtgacggcaaggcgcaagaagccgcggccgctttcgccgaaggcggagcctttcacggtgaggacgtgggcttcgtctataagcttttgccacacctcgtcttcggtgaggcccgtggggcgaatgtccacgaagaggtagaaggtgcctgtggggtaggcgatgcgaatgtttttgaggcgtttgagccgttcgtaggcgtggaaggtgcgctttttaaattcttccaccaccgcaggctgcacttcttcgcgatgggtgagggcgtagagggcggcgcgctgggaaatggccggggcggtgtagacattgttttcgttcacggatttcgccgcgacgatgaagtctctctcccctaagatgtagccgatgcgccagccggtcatggcgaagtttttggagaaggagcgcagggtaatggtgcggtctttgcacgcatccaaggatgccatgggcacaaagggcccgtcgtaggaaaaggcggtgtaaatatcgtcggctattagatagaagtctttttcttccgccaagcggcccagggcttcgagctcttcttttttcaagcacaggcccgagggattgtttggcgtgttgacgataagggccttggttttgtccgtgactttttcgcgaatcacatcgatgttcgggcgaaagcccgcctcgggatcggtgggaataaacacgggcacgccccctgccattttcacctgatcggcgtagggggcgaagtagggctcgataatcatgacttcgtcgccttcatcgagcatggtttcgaggacgagccacatgccgtggcaggcggaggtggtgacgaagacattgtcaggcgaaagatcgacgccgtatgcctctttttgaaaatccacaatggcggcgatgagcgcttcgtcgcctcggctattggtgtagtgggtgtggccggcgcgggcatctgccgcggcggcatcgatgatggctacaggcgtggtaaggtcgggatcgcctaaggtgaagtccaccacatcgggatgggctttggctaaatcggcgccggccgccaaagcaccgcttccttgggctgcatattttttcgaaattaagggcttcttcatgcttcctcctctgtggcttcgttttctgctatactaaaattattgcaagaatctttgtgatcggtttaggaatggttctattataaaggaggcttcgcggaatggcaaaaaaatcggactatacagtgcccatggtggagaaggcactgcaaattttgcgttttctcttggaaaacggcggcgcccacggcacgggcgacattgcaaatcgcctgaatctgcccaaggccagcgtgtttaaaattctctacactttggagcgggagcatttcgtggccaaggacagggaggatcgctaccgattgggcctgggctttattccctacgacgccgaggtgcgcaatcgttgggatttcaccacggtgacgcggcccattatggagcgggccgtggccaccatgggggaaagtttgaatctggggatttgcgccgacgacaccatcgtggttttggacacggtggccggggaagatttctatattatgcgccacttaattcccgtggcgcccctgtattgctccgccatcggcaagatttttctcgccgagtacgaagaagaggctttggatcgctacctcgctcgccacgaactcgccccccgcaccatttccacgctgacgacgaaggaggcccttgccgcggatttgcgtgaggtggtggaaacgggcacggcccacgaccgggaagagtatgaatacggcctgacctgcatggccaagggcgtgtattttaacggcaagctcatcgccggggtgagcctctccggccccacgagccgcttggaacacaagggcatggagagactggaagaggccttggccgatgtggccgatgctttggcggcggaaccgggcttggggacccttttatctctgtgatttttctttattttctcgggcccgttgttttttcgacgatgcaaagcgtggccctgctcgtgcccgggcttttgtgggcattaaaaaagcggccggcgataaaaatcgcagccctcgccttttttcttttcgccctcgcccttgcccttctcggcatcgacggagcacctgcagccctcgccgcctcgattttgctcctcgcctatggcctgccccgaatgaagcgacccctttatctgcccgccatcttctttctcatccttcttcaaggcgggctcttggcctttcgcggcaccttttcttacgcatctgcgagggccgctttctcctacgcctttgtgaacctcatcttcgtggcatcggaggaggtgtttctgcgggaggtcttgcggaagcgattgggctcgggcttcttccccaccctctttttgggcctgctctggggcatttggcacgtgccctttcacccgacgtcgggctacggggccatacaaatcattcacgccgccgctctaagccttttaatcgacggcatctacgatttttccggcctcgccacggcgatttttcttcacagcctacataatgccctgcccctgttttttcacgctgccttttctccggcggaccacctgcttttcttctgcggctgctgtctcttttattacttcgtaacgaaagttaccgcatcaaaaccccgggggccttattatagaagaaaagaaaccgacgaggaggatttatgagtttatttttagcaccgattcaccaaataatgtacgataaaattcactacaccgacgatttggccaccgcactggctgaaaaagatccattcgcggcccgggctctggaggaaaatttccccgccatcgaaaaagagcccctggaagcggtaatcgatgagggaaacattcacggctggctcgccgagcgtgtggtgctggcggaaaagcgcttggcttttgcggcctgcgccctggcgaaaaaggaccgtgccgggctaatggatgccgtcaaagacttcggcaggaaggaagctttttcaggaagcgccgatgaggccttcatcctctacgatcgccgctttttaaacggcatgccctgcgaccgcgttcacatgcccgaagaggcggaagaaggcgtcgcctggcgcatcacgcgagacgtccacggcgaatactacgacgaagccggtctttacgacgctcttatcgccgcctggtgggagggcttgttggacggaagcgaattgaattaccatcgtgacggaaatttatgcacggtaaaataaaaaggctgccgcatttgcgacaaccttttatttttttgctttctacgcatccatgttcacgcgccacttgcccttgaagtaataaatcatggtcaaaatccaggtgaagacccagctaatggggtagctccagcagataatgtcgatggttttgtacatgggcatggcgataaagatccagctcaggcgaatgatgaacatgccgattaaggtgatgaccataatgggcacggcggtgccgcttccccgaatggccccggagaggacttccgtcgtggaaaagatcacgtagaagggcgccaagatcacgatcattttcgccccgtagaagatgacgtctttttccatggtgaaaattttcataaggggcgtgcggaagatcacgaggatggaggagacggaggccacgaagatgagggtcatggccagggcggtgacgatgccggatttcagacgcttgtgctgtttcgcgccaatgttttgccccacgaaggtggtaatggccagggcgaaggcctcaagggatgtgaagacaaagccgtcgacccggctcgccgcggccaccccggcgatggcctgggcaccgaaaacattgatttgtgcctgaatgatgacattggataaggcgatgaggcccccggagatggcggcgggcaagccgatggccacgatgcgttccaaggatgccttgtggaagcgaatgcgcttcagacgcaggcggtaaatgtccgtggtctttaaaaggctcagcataacgaggatgcccgagacggattgggccaaggccgtggcgatccctgccccgacggcgcccattttcagcacgccgacgaaaatcaaatcgagaaggatgttcagtcctgcggcaatggcgaggaaattgaaggggcgtacgctgtcgccgacgcttcttaagaccgccgagcccatattatagaccatgacgggaatcaaccccgcaaaaagaatgcgcatgtagcgaatggccgggcccataacttccgccggcgtatcgatccaggcaagaaactgcggcgtaaaggcgacggtaattatagtaagggccaagccgccgtaaagggcgatggcggaattggtatgtaccacttttcccagattggcccgatctttcgcgccgtagtattgggccaccaagacggacgtcccggtggaaaggcccataaacagggcgacgacgaggacggtgatggcgccggatgcgccgatggcggccatgtcgatttttccggcgaagcggccgacgattaaaaggtccaccgtattatagagctgctgcagtaaagcggagagcagaaggggcagcgtgaaggtaaggagtcgtttccaaatgacgccttcggttagattgacattttctcgcttcatagtccctccctttcttttctcaatgacacgatgacctatcttaacacaagccggggaatattcccacagaaacggctgaattttacagcttctttcccttttctacggttttaataatggattgggcaaaggcgtagcgcatggccatggattccaaaaccataaccccttcgatggtggcaccggcaggagaggtgactccgtctttcagctgaccgggatgcaagtccttttccgtcataagatcgcaggtgcccgccacggctttcgccgccaaggtgtaggccaaatcccgcttcatgccgcaggcgcaggcgccgtcgacgaagccttcgattgccatggccacaaaggccggggtggcgccggttaaggcggtgacgatgtccagatctttttcgtccacctcgacgatgtctcccgcgccctttaaaagcgcttcaaaggatgctttttcctcgtcgctcatggcgtagcccggggtgtaggcgatgacgccgcgtcccacggcgacgggggtgttgggcaagatgcggatgattttttccgtaggcgccattttttgaagcctgttaaggctcacccctgcggccatggacacgatgatctgcccttccaccttcggcgcgatctctttcatcaccgcctccaccatgtagggcttggtggcgataaacaaaatgtcggaatgatccacgacggcgctgttgtcccgggtttggaaggtggcgatgtccttttcgcggggacagccgacgaaaagatcgtgaccttcttttaaaaacacatcgtaaagggcgcggcccatgttgccgagaccgatgatgccgatgttcatttgcatcccttcctttcttgaagcactattctccttacagtatactattgaacaggaggtcatgcatggataagacgatttctatgaaaaaattattttttacttttctaaagatcaatacctttacattcggcggcggctacaccatcgtgcccattattcgggacgagtttgtagagcaccagcctttaatcagcgaagacgatatgttggacattgtggctctggctcagtcggggcccggcgccatggccatctccgcctccctcttaacgggatacaaattgcggggaccggcgggggcggcggtgtgtctcatcgcaagcgtactgccctgtttggtgattattctctccattaatatggcctaccgccaattccgctcgaatttttacgtgaacgcggctttggtagggatcagcggcattatttccgccgtactctttctcaccacctaccgcatgggcaagcgggccataaaggacgaccggggcttttccgtgttgatgattctcgtggccacggccctggggatgtttacggatattaacacggcactgattattttgcttttaggtttcagcggcatttgcatcacgaaatttgaagattacacgaaagaaggacactgatgaaagagtttttgcacaagaaaaacgtgcacccgaatttaaagacctacggcatcgacgccttgggcgccatggcctacggcctcttcgccacgttgctgatcggcaccattttaaacaccatcggcacccagctgaacattccctttttaacggagaccctttggcccatggcccaggcggccacaggccccgccatcgccatgtccatcgcctttgcattggatgcgccgcccttggtgctcttcgcctcctctgtcgtgggggcggcgagctacaaaatcggcggcccggtggccgtctacatcgcggccattgtggcggcggaagcgggcaagctcatcagtaaggaaacccgggtggacattctcgtcaccccggcggtaaccgtcctcaccgggacattgatcgccgtcttggtgggcccttccatccaatggcttatggaaagcgtgggcaaactcattatggccgccacggaacaacaacccttcgtcatggggattctggtcgccaccatcgtaggcatcgccctcaccctgcccatttcgagcgccgccatttgcatgatgctttccctggcgggcctcgccggcggagcggccaccatcggctgctcggcgcaaatgatcggctttgccgtcatctcctttaaggacaacggcttcgacggcctcttcgcccaaggcctcgggacaagcatgcttcaaatgcccaacatcgtgaaaaaccccagaatttggattccgcccaccgtggccggcgccgtgatcgcgcccctttccaccgtggtctttaaactggaaaacacgcccctgggaagcggcatgggcaccagcggcctcgtgggacaaatcggcaccattcaagccatggaaggggccatgccctttgcgaagctcatcctcatcatcgtcatgctccacgtcatccttcccgccctcatcagctacatcgtctaccgcgccatgaaaaagcggggctggatcgccgacggagacatgcgactggatatttaggagatggccatgttacttgcgaaattattttatgaattctttaagatcggcctcttctccttcggcggcggctacgccaccattcccctgatccaacaatttatcgtggagcgggaaggctggcttaccatgacccagtttacggatctggtgaccatcagccaaatgaccccgggccccattgccattaacagcgccacctttgtcggcgcccaagtggccgggcccgtaggctccgtggtggcgacggcgggggtcaccgcgccgcaaaccatcatcatcctgactttggcctacttcctctttacgaaaaaacgctccttccgcctgatggacatgcttcttcggggaatcaaggcggggattatcggcctgatctttatcgcttcctacgacatgtttaaaaacgccctgtggccggaagggggcggcctggagatcgtggccctcattacctttgtcgtcggcggcgtgctctatgcgaaaaaaatggatcttatcaagcttattatgctgggcgccgtcttaggcatcgttctgaaactggccttgccccttgtatcctagactgcacccccttgcggggaatttttcaaccgaggtgaatcatgaaatacattctggccatcgacgcgggcaccacgtccaatcgggccattctctttgacgaagacgcccgggttatctccgtggatttataatattttcttagctatctcgatatgtaacttgacaaaaatcaatgagagaaataaaataaaaaaagttatcaaaatggtttttatttgtacatgacaattgttcgggtcttcttgtacaaacactttttcccgaacggtatctatccgaaattatttataaatcaaggaggagacgcatatgaaaagaaagcatttttcgatcatccttgcggtgatcctggcgttcgtgatgatggcgccgacgctgatttcccaaaaggctttcgcggaggagtataggatcaaagatcctattttgcgagagctgatgaatgaacgttacggtaaaccggcggattacaaccttccccctgaggaactttcgcgtatagtatataccggtgacggctggatgaataaaggcatacgcactctcgaaggtctgcagtattgcacgaatttgaaaggggcgaattttgcggggaaccctatagaggatgcgtcagctttgtccaaccttaaaaatttaaaaaggctcaacctcaacggagcaaagatcaaggatctctcgttcatcgaaaacggggaaattgatttgattgacctcgaaatcaacaacacgggtataagagatctttcaccgctcaagacaaagcgcacggagtgggagtacttaagcgcttccggcaatcatcttaccgatgaagatatcgccgtgttcagcgacatgaacatcaacaatatcgacgtatcgaataacgacatcaccgacccgagcgtattcaatcacatgaaaaatgtggaaaacttgatattgacgggaaatcatataagcgatctttccagggtgggacagatcaactcaacgaccggtgaaatcgttgaggtcccgcgtttttaccgggcctctgatcaaactatcacgagatttgcaaagaacggcaaagtatccagcatcataaaagactacgacggcgctttacttaacgatgagaagcacctgaaaaacttcgttaacgtcagattgaacggagatgagttcgagctgatcgacccgaacaagccgggctccgttgaatttgctgccgatgcctataaattcttgacgggagaagtctacgtccacttcagcggtaaaataaatatcgtgagcctggcaggcgtaatggtaactccggaaacggcgaccgtagaaaagggcaaaacgcagcagttcacagccactgtcgtaggacagggcgagtttgacaggaccgttacgtggagcgtgatcggcggcggcgcaggaacgtcggtcgatgcaaacggacttctcacagtaggaaagaacgaaacggcaaagacgctcacggtaagggcaacgtccaatgcggacaacaaggtcttcggagaagccacggtaacggtaaaagagaatgctcccgtcgtagagcctaccgtaacgagaataaccgtaacacctaagaatgcgaccgtaggaaagggcaagacgcaggcatttgcagccactgtcagcggaacgggagacttcgataagacggttacgtggagcgttataggcgggcacgaaggaacgtcgatcgcagctgacggaacgcttacggtagctaaagacgagaacgcaaagacgctcaaagtgagagcgacatccaatacggacaacaaggtcttcggagaagccacggtaacggtaaaagagaaggctcccgacgtacatcctaccgtaacaggaataaccgtaacacctaagaataagaagaaaccagtcgagtccaaagaagaagtccacctagcctatattaaaggctatcctgacaaaacagtaaggcccgaaggcaaggtgacaagggcagaagtggtgactatggttgtgaggttaaagggctatcctttaattgaaggccaaggcctttacaaggacgtaggaaaagataagtggtgtgctccctatatcgaagctgcctataggcaaggaattttagaggaaaaagcaggagaagcttttaggcctgatgaaaagataaccaggggcgagctggcacaaattattagccacatcgataaaaagaatgatgcaaaggctccttttaccgatatagagggttacaaatttaaaaaagccatagaccaaagctacggcaacaagagaatcatgggatatcctgacaatacctttaaaccggatgctgaaataaccagggcggaaacagcggcaatgttaaacaggctgtttgaaagacatgtagggcaagacggccttaaagatttagttataaaggagtttaaagatttaaaggataagacttactgggcatattatgatatagtagaagcatctaatgctcatatatgtacaagagtccatgaaaattctttggaagaagtttggaagctaataaataaataaaaatttggctctataataaatagtgttggtgagaaatcatcagcactattttcgtatggatatgcatataaaaaatagataatatgtattttggaataaaaagataattttgagttaatcctggaagattaaattgtataattttttacaaattgcttaaaaggacacagcgccaccttcgtcggtggcgtactctactggaagaaaatggatcttatcaaactcattatgttgggcgccgtcttaggcatcgttctgaaactggccttgccccttgtatcctagactgcacccccttgcggggaatttttcaaccgaggtgaatcatgaaatacattctggccatcgacgcgggcaccacgtccaatcgggccattctctttgacgaagatgcccgggttatctccgtggcgcaaaaatccttccgccaattctttccccaaccgggctgggtggaacaggatcccgcggaaattttagccaccaccgtcggcgtctgcgccgaagccatcgcccaggcccaggtggatcgaaaagacattgtggccatgggcattaccaatcagcgggagaccaccattctttgggacaagaaaacaggcagggccatcgccccggccattgtgtggcaatgccgccgcaccgccgatcgggcggaggccgtgaaggaggcgggctacggcgatatgatccgcgaaaagacaggccttgaggtggacgcctatttttccgccacgaaaattgcctacatcctcgaccacgtggaaggggcgcgggagaaggcggaaaaaggcgaggtccttttcggcaccgtagacagctttctcctctaccacttaaccggcggcgtgcaccgcacggacatttccaacgcctcccgcaccatgctctttaatatccacaccttggattgggacgaggagttgttaaaacttttcaacattcctcgtgcctgtttgccggaagtgttgcctacggcggcccatttcggaaacaccttggcggaacacttcggcatcgccattcccattacgggcatgatcggcgatcaacaatccgccctcttcggcgagcaatgctttgaggtgggcgaagtgaaaagcaccttcggcaccggcgcctttgttctgatgaatacggggcacaaacccattatcagcgaacacggcctcctctcctcctgcgcctgggacatcggcgaggggccgatctacgccatggagggaagcattttcgcctgcggcagcgtgattcagtggctgaaagacgacttgggcctcgtggccacgccggaagagacggcggccttggccgaaagcgtgaaggagaaaaatcccatgctcttcgtccccgcctttacgggcctgggcaccccctattgggatccggaagcccggggcacccttttcggcatcagccgctccaccaccaaagcccatttagtgaaggcggccctggatgccatcgcctacatgagtgccgatgttatcgacgccatggaaaaagatttgcaagcgagccacgaccgcattctcgtcgacggcggcgtgagccacaacgactacctcatgaagaccttggccgatgccattcaccgctccgtccaccggccggcgctggtggaaactacggcgctgggcgccgcctttatggcgggcatgggctgtggcctttacaagaacctttcggacataaaaaaacgggcctccaaggcccaagtgctcgccccctcagacgccgacctcacggcggagcgcgcccgctggaaaaaagccgtcgccgtcaccatggccaatcacatggattgaccgaaggcgtttaggcgctgaatttctttttcgtgatccgccccctcccccggggtttccaaaatcatgggaaggcccttcacgggatcggcgtagagaaaccgcccgatgacgtccaaaccgatttcgcccgcacccaccggtgcgtggcgatctttttttgcgccgaatggggtgagggagtcgttcacgtggacggcctttattttttcaatgccgattaattcgtcgaaggtatgaaaaaatttctcgggatccgacaaatcgtagccggcgctgaacaaatggcaggtgtccaagaccacgcccacatcctccgatgccagggcgtcgatgatttctgcgatctcctccaggcgacagccgatttccgtgcccttgccgctcatggtctcgaggcaaatggcccggtggggaaataattccttcgccttatccatggcgtcgatgattcggcggatgcccactgacccaccgtctttcgtgtggcttcccggatgaaagacgtagaccgtatcctccgggtagtgggcgagaagatccatgtctgaagtgaagatctcgaagcttttttccctcacatcttcccggctcgaggccaggttcatggtgtaggcggcgtgggcgacgatggggccgaattcttttttcatgcgaataaacttttccatgtccgccacatccagcgcccgggccttggagcctcggggattcctggtgaaaaattgaaatgtattcgcgccataggtcttcacctcttccatggccttgacaaagcccgaagtcgtcgacgtgtggtagccgatcctaagcatagtaatttcctttccttcttaaaccctcaaaaggcacaagaaaaaagtgcccgcaggcactcttttcgcacgaacttaactaagctaggggaatgtagtttaccaccggcacttcgtaggggtggatgcggtcgatgatccgctgtacttcttcccgatcctcttcggcgatgcgaaattccattttcatttcctcccgcgtctgcacctgaccgatgacgccgtcgtagggatcggcgccctccaggggccgccagtggccttccaccttcgtcaggctgaaggtgtaatcgtaattgccttcgcggaaaatatccgcttcgtttaaatcattggcgagctccacgacgaaatcttccggtatgaaaatttcaacttttaaataactcatagaacctccccttccatatcatcctcaatgtcttcatgaatcgggtcgatggcatcgaaggcgccgcgggccacgagttcccgaataacgtccactacagcgacgtagctgatgaggccgaagatgaccgtgctcacgacattcatcaccttcatcaacgcgccctgggtcatgcccgatgccgcagcggccaagccgatgcccccggaaaacacgagaacgatgatgacgacgatggccatgcggccgaagatcatgcccttgtggcccttggtgatttgccaggattctctaatgggcgtaaaggcgccttctcgcccgcgaatgccgtcgatgccgatgacggcacctaggggcaccatggccagagaaaagatgatcgccggcacaatgagcaagaagaaaaaaacgacggtgagaattttttcgataatataagtgccaatcgaagagacaagcttcgggttaaaaaagtaaaaagcgtcgacaaattccggtgttgtgtcgtagcgagccatgcgatagatcatgagaatcaggccgtagcccacgaggcccacggcgattaaataaatcgtgtgaacgagaagggacacgcctgccatggcgccgaagtgaaattccggcatgggcatggcggggtttgcccccggtgtcataaaggcgtcggttcccaaacccatcatattaaaaatttgggtgaatcccgcgacgattaaaagataaataagtaaactggggaacatggctttgtaaatttccatggttgtttttttcataagcagctcctttcggatgttgaatagggtttgcctttacttatacccaagacagggagacatcccacgattttttacgcagaaattcgtcgtttgccgttgatttttcgaatggcgggcaaagcctgggacacgaattgcccggtgaggatcaggacgcagcccaaaatcttcttcggataaaagacctcgccggcgaaaaaataggcggcgaaggtgccaaaaagggattccgtgctcataatcaaggcgctctcctcggggtttgcgtcccgttgggcgccgttttgcaggtaaaaagccaccaccgtgttcaagagcacgatgtagcccatggccaggaacgtcttgtgggtcacgggggcgatgaccgtgccctcgccgaaaatgaaaaagatcacgatcgaggcgagccccgccacgaaaagttgcaccatggtaaaggcgatggcgctttgaactttgggcatgtagtggtcgatgcgaataatttcgatggaaaaaagaagggccataataaagctcagggcgtctccgcggttgagtacgagggagggacccagggtcaaaaagcccacgccgatgaccgtaagtatggccgccaccaccatgtgcttgcccggacgaatcccggcgatgacgaagcgaataaggggcacgagcaccacgtagatgacgagaataaaggtttgattggcaggcgtcgtaaatttcaagccctccatttgaaaggccgtgctcaccgccattaaaaggctcacttccgatgccccgattaccgtgatcctgtcgatctttttccgctccttaggaaagagcaaacacagggccgccgcccctgcaaaaaaacgcagcaccataatgaaataggcgtcgaaactttccatggcgattttcgccgccacgaaacagccgccccaaatcatggccagagcgagaagcatgagattggcccgtgcctttttcgagagcgccctagtcatctaaccaactcttcagccggtccatctcctccggatccgccatgccgtagaccaccggtgtcaccgtgacataatcccgctccaaatagtagcgatccgtgcccgaaaggtgttccatggtgcttctgccctttaaggtgaggcggcgctccccttcgatttcctcttcaaaataatagtcgtaggcattggagccgatttccgccacgcaaaggccctttaaatcctcctcgtctaaataaggcacattaatattcaacaccatgggcttcgccgaagaaaggaaaggcttcttcaccttgtcgaaaatctttttcgccacagccgctgccgtgtcgtagcggcattggcccttgacccagcgggcgctgacggccacggagggaatccccaaaagcaccccttccaaggcggcgctcaccgttccggaataaataatgtccatgcccgcattgtagcccgcattgcaaccggagaaaatcacatcgggcttgaagggcacaatcttatcgagccccgcccgcacacagtccgccggcgtgccgctcacgctataggccgccacgtccaccccttcgatttccacaggttttacgatcagagaatgcttaatggtaatggcgtggctttggccggaatgctcttcctccggtgcaatcactaccacctcgtgttcctcggccaacaccttggccaaagcttgtatacccggcgcaaaatacccgtcgtcgttggttaaaagaattttcatgcttcctccttagagctcgatgaagcgggaaggcaccttggccttggccacttccaaaataaaatccctgccttcgtaaatggcgtgttccgccaaaatttcccgggtggctctcgccgccaacagggggcgattattctcctcagacaaatgggccaagatcacaaactcgcccttcttctccaacagccccgtcaaaagctccccgcagtgctcgttggacaaatggccccgggtcgatgcgattcgatccttcaacatgcgggaatagggcccgttttccagcatatccgcgtcgtgattgctctcgatgtaatagagatcactgccgctcatcttctccagcatggacgtattcacccagcccgtgtccgtgagcacggaaagcttcttgcccccggagcggatcacaaagcccgtgccctcggcggcgtcgtgaaagagccccatgggcacaatgtcaatgtccccgtaagaaaaaggctgctgggtgagaaagacgtggcgcttgtgatcgtcaatgcgcttcaccgtcttcgccatggcctgccaggtgttttcattggcgaagacatccaggccccagcggcgggccaaaatccccacgccctttacgtgatcgctgtgctcgtgggtgacgaaaatgccgtccagttccgaaggctccacacccacggcccgtaaattttcctcgatggccttgccgcttaaacccgcgtcgattaaaatctttttttcgttcgtttctatatattggcagttgccgctgctgccactggccagtgcacaaaatttcatagtttcctccacagcctattatagcaaactcttcgccggggaaaagagaggaaacacattcttcttgcgcgccccaccggaattttacaaaacgaccacaaaaaaatccccgaaaccggatggcctccgatttcggggaaaatcatattatcttgcagcttttctgaatttattccctacgcatgtgaatggcatctttgatgaaggtgccggctttgatttcgtcgtaggcttctttcagttcctcttccgtgttcatgacgatgggcccgggccaccaggcgatgggctcgtcaatgggctcggccataaagaccagcacggcgatttcctcttccgtatcgttggcgatgcggatttcatcgccgcctgcgagtatggcggcatcgaagtgatctacgggctccccttccacagtggggcttcccacgagggcgaagagggtaatgttcgcccgctcgctcactttggtatggaatgtgccgccgggctcgatgtggacgtcgtagtaatttacgggcacatagtcggagagatggccttcgcggccttcgtagcttcccgccaaaaggcgcacatagccgccgtcgaaggggatttccggaatgctgtctttttcgatggccaggtaggcgggcggagcgaatttatcttctttcttcatattcagccagagctgcacgccgaagaggcgcttcaccggcgggagtttttcctcgtggaggatgccgccccctgccgtcatccattgaatgccgccgtctgtaacggcgtcttcattgcccagggaatctcgatgcaccatgctgccttccactacataggagatggtctcgatgccgcggtggggatgcatgggaaagcccgccacgtaatcggcgagatcggtggcatcgaaggcatctaataaaagcaagggatcggtgtcgtgcatggtgtggcggctcaagacgtgggtcaggtgcacgccggcgccgtcgacgcctgcttcgccgcgaaccacgcgcttaatttttcgaatcatcgcagttcctttctctttctgttgcttattttgcttgctttttattgataccctgaaattatttttttatttggcggatatttcgatgtaatttgtttaaagaaagggcgactatggtatataaatacaaaggaggcgtatctatgtttaagaaaattttagtccccgtcgacggttctcaagactcttactgtgcgctgaaagaggcggaattgttggctgaaaatttcggttcgaagctgatcattcttactgttttaacagacgccaatgtgatcgaacattatcccggcaatttcctttccacggattttaaaaaagcgcaagccctgcgcggcgagcaaatcctggacaaggctttgaacaccatcgaaaccaagggtgaggtggaaacctgcgttcgcgtgggccgggcatcggaagaaatcgtcaaatgctccgaagaaaaagatgtggatctcatcgtcatcggcagtcgcggcttaggcggcttctccagaactcttttaggctccgtatcggacagggtattgaatgcggccaaggtccccgtattggtcaataaagtaaactgcagaatttaatttataaagcaccttgcttcggcagggcgctttttttatttctctttgtttcttttttaaaattggaaggattctgcggatgacaaatagttgatatacgtagccgactgaaagacgcgttgatttatttttcgcttaaattacagtattacacggttctgaaacccggggaaggggccagggcgttgcgattcgccctctgccccttccccggaaagaatcgcgaagatatcagctaagaaagagaaatttggttcgctaatcacaacacgtgtgcctatttgactgcaaatactcgccgagtaaaggaaaattacagatagtctctccttttcaaataaaagtacatcaagataataacggcaaaggtaagccccaaaagccaccaaaaagcgtggggctcttctgaaaagggcagcgaggtgttcatgccccagtaaccgccgataatggtggggacggtcaagaggatggtaatggaggtgagggtcttcatgacgtcatttaaattattgcccacgagactggaatagagatcggacagtttttctactgtcaccgatgcttcttttaccatgacccgcgcttgtgtactttcaacttttaaaccattgagcagttggtttctggaaggggagctgttcagcgaatccaggtgaaacaaatcgtgtaagacgaactcgttattctccgtggccatggaaaagcggatcaaacttctcgacagtttgatgagttgttgaatggtctcgctcttcgtcgagcgggccatgtccccctccagcacttcgatgcgcgcgttaatgtcttttgtcagatcaatataggatttacagatatggtaagccaggtcgacgagggttttctctttcggaaaattttcgtctttgatcaggcgatgccctttgttctctaaaaagccggagaaggcccgatcatcttggtattttacagtgatgaccacctcctcagtgttaatcatcgccaagggccgggtttcgtaaatgcctttcgccacctccaccggatagcggagaataaataaatcgtaggtcgaactctcccggccgtcgcttcgggccacctccccggggtcggcgacggaagagaggacgctttcgggcactttgtatttttgtgacaaggaccgaatctcctcctccgtcgggtcgatgagatgaacccatcggcaggtgtcattctctgataaatcctcagtccttacgctgtacatttgatcatggttgtaaacatagtatttcatgacatctcctcaggtcatcatgtgtgaatctatttgcaatgggcgatttttcccataagcttctgattaaactctacaccttgcgcggttttatttccatagccgaagagatgaattcaagcgacttttttctttgcggaaggccgcattttccccgtccccacctttttttggccgcgcctaagttgtaagaaaatgcctgcgccattttctactaattgggatgcgtcgcgggaagaagaatgtgaggtgggcgaagaaacaaattagtcaacgaaaattgcttgcccaaatcaaaatgattcaaaaacgaagaagcccaatacaaatcaaatgccgtcaggcatttgcactgctaaaaggcgtttgtgggtggatggggatggggccccggggaaggggcagagggcgaatcgcaacgccctagccccttccccgggtctcaaagccatgtaagaatgaatattcaagcgaagaaagtttcttgaatttctaacattagctacgcttttaaaaatctatcaccactgaattaacgccctttttccctcccccggaagtcgttgatgaagctatggtgtgaaagaaattgaataaatttacttgcaaatagtgggccactgaaaaccaagaacaagaaatgagaaaaagaattgaaaataatcatatgcaaatcacaaattcagagaataaaaaaacaaaaactcttttcctattcctcttgcttgcgcattcgcaagcaggaggaatattttgtcctcaatattttaaagcaaatatggtttacaaccccctttctacgcgatacaatgaccaaagcaattcgaagcagaaaggttggttttgcagtgaatattttagatacagtcggaaagacgcccctcgtgcaattaaccatgggtggcggccgcatttacgccaagttggaaaagaataatcccgccgcatccattaaggatcgggtggcttatcacatgatcgaagatgcggtgaaccgcggcgtgctcacgccgggcatgaagattgtggagcccacgtcgggcaacacggggatcgccctggcgttggtgggcaagcaattgggctatgatgtggccatcgtcatgcccgcctccatgagcgacgagcgcaaggcgttgattcgctctttcggcgcggagctgattttaatcgaagaggggggcatgcaaggggccgtggacaaggccaaggaaatggcggccaccggcgagtatttcttgccggatcaatttaacaacccggccaacccccgcattcacgagctcaccacggggccggagattttgtcggcccttgacggcgatgtggcggtgtttgtagcgggcatcggcaccggcggcacggtcaccggcgtgggtcgcgccttaaaggcggaaaatcccgccacgtatatcgtgggcattgagccggcggaaagcccgttgattacggaaaataaagcgggcacccacaagattcaaggcatcggcgccaatttcattcccggcaattacgatcccgaggtggtggacgaggtcatgaccatcgaaggcgatgaggccattgccatggcgaagcgattaagcgcagaagagggcctgagcgtgggcatttcttccggcgccaatgtggcggccgccctgaagctttcggagcgcttcgaaggaactatcgtcaccgtgctgcccgatgccgccgaacggtacatgtccacggagcttttttaggctatgttatttaaggagcgcataaaaatcggccgagtgatattagaaaaggacccggcctgcagaaatttgtttgaagccatgtttctctaccccatggtggcggcgctgttgagccatcgccgcgcccatcggctgtataaaaagggccacaccaccctggcccgctttctttcccaccgggcccgcagaaaaacggggatcgagatccacccgggggctatcatcggcgagcggttgtttatcgaccacggcatgggcgtggtcatcggcgagacggcggaaatcggcgacgacgtcacgttgtatcacggggtcacgttaggcggccgcggcctgagcaaaaccaagcgccatcccacggtgaaagacggcgccatgatcggcgcgagggccacggttttgggccccattaccatcggcgaaggggccaaggtcggggccggtgccgtggtgctggatcccgtggcggacaacacgacggtggtgggggtaccggcggaaaatgcccacccgaaaacggcggattttcagttttctctcccccatcacgcctccaaggtatctgcccgctaaattacgagccgcctctctgcaccaatttccatcggcggtgcatcaaaaggctatgaaaagcgtctcctcgggaggcgttttttcttttcctttctttttgtattgaaattgttttcaaaagaatttatcatggtttataaaggaggtaattatgttttgtactcactgcggacacgaattgtcccctgaagataagttttgtaccggatgcggcgcgcttgtagacgacggccccgcgtcggaggaagaaaccctttcctaccgacccgcccctataccggaaggggcatcttctacctacgaccgcttcccggaaaataatcgccgccaagtgcccggccgatttaattggggcgccttttccatgacgttgatttggggaatcggcaatcgatgctacataaccctattgtgcctcgttcccatcgtcaacattattatgccttttgttgcgggctttaagggcaacgcttgggcctatgaaaacaaccgctaccgcgacatggaagaattttcccaagtacaggacacgtggaatcgcgccggatttatctgctttatcattcaattgatcttcggcacgttctggattttcttaacacttgtgtcgggcttaaacctatttatggcgcccgttttaggtgatatatgatgaaatgtttacattgcggcgcagacaatgcagccgatgcaaaattttgtaaatcctgcggtcaaccgttggagagtgaaatcgtagaggacacggccgtcataaaaccggtggacgcttacgatgcgaacccggcctatggctacgacgaggtcgaggagaaaaagcccgtggacaaaaagaagggcgtcatcatcgccgcttccgtggccgccatcatcgtgcttcttgtgctctcggtgtttatctaccgcacgagccggcggatcagtttggaaaaatccgctgccgccgccattgaagatgaaaattacgacaaggcccgggagcagtacgaaaagctctacgacatgatgggtcgcagcgtctacaaggatcgggcgacggaggccaagaccatggccaaggacgtggatcttttggacgaggccaaggatgcattccaaagcggcaattatgcagacgccttgcgtatgtacaccgccattcagaaccacgaaaacaatctttccgacaaggcgagagacggtgcttttgatgtgcttgaggcggtaagtcaaaaggttgaggcccttatcgaggccgacgactacgacagtgccatggacatggtcaacgggctcatcgccattgcaccggacaacagccgcctgaattttttaaagaaggaaattaagaatggggcgcaaaatttaagcgaggaaaaaatccgcaccgccaccgccgaatcggaagccgccaaggccgcggaatcagcgcaaaaaagtgccaagcgggcctcggaagcgaaccgcattctttacaccgtgcaatacgtcaccgccggcgaggccaatgtgcgcacgggcccggggaaaaattatcccgtggcctacaccttgacccgcggcgccgaagtctacatcatcgacacccgctcggattccgtcaggacctggtgcaatatcggcgacggatggatttcctaccggaccttaaacggcgaattttaaatttttcctgaagattcctcccaagacccttgtttaattgcatagccaactgattaaaatccgattttctattttgaataaaaatccattcttacatggttttgaggccctgggatggggaaaaggcgtcaattctgtggtaatcgattaattgaagcctagctgacgttagaaattcaagaaactttcttcgctttaaaattcattctttcacggcttttaaacccggggaaggggctagggcgttgcgattcgccctctgccccttccccggggccccatccccatccacccacaaacgccttttagcagtgcaaatgcctgacggcatttgattcctaccgggctgtgttgcgtaagaaagattttgagttggggcagtctactttttaaaaatggtaacggctcgcctgactcattgtcatcgtctagcgaagaagcccagcatacaaaaaaccctgtcggcggacagggttttgttttgcgcttatttcaagctgcggccaaaggcatcggcctttaaggcggcggcttttattttttccacggaaatgggtttgctcgagcgcttgtattccgtggtttcgggaacgaaggtcatcatttcgtccagatcgtctgccgtgaggcccacgtcttccaatgtaatgggcaggcccaaagactgattgaagcgggcgattttttccagctccgcctcgttgtcgtcgtaagcgtgaaggaccatgacgccgaaggagaccacttcgccgtgaaggtactctccttctctcgggatcaagcaggcggcgtcgaagaagatgtgggcgatgtaggaattgtagtagaaatccggctgattggtgaggttgctcacatagcctgtggagaccaagacgtccagagcgatttcttccacggcgcgggagacgcggttgttcttcacatcctcaaggccttctttgccccacttcaggaagggctcttcgcaggttttggcaatgcctacgcccaggcgggccatgtggctcaagtcgtcgcccttcgatgcggaaaggacttccgcctgtttgctgatgccgtcgccgatgccggcccagaagtaaatctcaggggcttcggcgatgattttcaggtcgataaaaatatccgagggagacttgggaaattcgtagcctttcacccggcccgactcgtcgtagaccacggcaatggcggtcatggccgcgcagttggaacagatggtgggaaaagaaaaggcgggcttgtcggcgcggagggaaaggactttcgtcgtgtccagggccttgcccccgccgatgccgaagagtacgtcggcttctttcacggcgggctcatttttcagccgctcgatgttggcgttggtgcactccacgccgtagacgaaggtgccggtgatttccacgtcggttcctttcagggcgtcgttaatttttccagaggcggcctttaaggcgcgctcgccgccgatgagggcgacttttttaaagcccctcgacgccagcacgtcgggcaattcgtcgtatccgtctttggacagatggtaattcggcatatacataatctattccccttttctttgcgatagtagaaaaacactatacacccccgcgggatgagacgcaagtatgaatgaggaagaatctattcttcctctgcgggcttttccctgcccgcttcttttttgtcttcccccgcctttttatccggcgccttgtcttccttcggctttgccttcaccggcttcaccgagggcataatgcccttggccaccacttgagggaaaaggtagaggcccaaatttttcgggtgggtgtggtcggatataaagagttcgtcttcttccttggcgattttgtgccagtcgataaggtgtacccgcttcgacgccttcgcagcattggcgagcttctcattcaccggctcttcccagggatcgggcatgaccgtgttgaccaagtacacgggatgctctcccgtggcggcgatgatttcatccagcaccttggtattgaagtcgtaattggtgcccagttgaatgacgatgggggcgtcctctgagagggcacttaaatcgtggctttgaagaacctccaagcccttcttcatttggcgatttttcatgccgtcgacggtaaatttcggcagaagcagtttaatgtattccgcttccatttccgtaaggctgtcgccgatcataaggccgtcccgcgcggccagggcgttcacctctttttccccgagggccacttggggccagcggcggttgatttccttgatttcgtcggagaggttttcgtcgtcgatgggctcgggggcctcggccttggccgcttctttttcctgtgcctcgatttttttcgcctcggccttttcttttgccgccatgcgggcgggactaaaggcaaaggtgccgatgagtgtcataagggcgagggcggcggcggagacggtccagatgcgctttttcaccgggcgcttaaagaggcggtaggtcacttcgcccaaaatgaagaggacgggcaattgaaggagcaccacgacaaagtaagacagctcactatgggagaaggcctgttgaaagacaagcatcaccgggtactgccacaggtagagctcatagctgcgggtgccgaagtagcgaagcaggggattgcccagggccttggcagtcgcgttatcgtcttttgccgtatagagcaagagggccgcgcccacgatgctgaagagggccatgccgccgtagtagaggaaggcggaggttctgaagaaggcgaaggagaggagcatgagaagcaagagccccgcggcgggcagtgttttcgccttttgactgcccttgaagctgcccttctcgccgatgagcccggccaaggcgcccatggcgaaggcgaagtagcgggtgtccgtgccgtagtaaatgcgggtaatgtcttttgtaaagggcgtcatcaggggcatgaggagaagggagatccccccggtaacgacgagggaaagggcgagcttgccccgattttttccgcagaaggttctcaaaattgcccaaataagataaaactgcagttgtgccgacagggcccagaagtgggtaaagggcaaaaattttccgtggagatcgaagtaggagaagccccggaggatttgctggtagttgtttacaccgaaaatggcgctgatccccgaagcggccacgtcgcgaaattccccatgaaaggcaatggcggcgatgaagaccaccacggccacgacaaagaccaaaggcggcgtaagctttttgtattgtttggcaaatttcttaaggggggcatgatttttctccgataagtgttggcccatgagcaggtagccggagaggaggaaaaacataaccacgcccaggtagccgccgacgattttgtggggatagaggtggtagagtatgacgccccacagggccagcgcccgaagccctgtaaaagattttatttctttgtgcacattcagtctccttcttaacgcacgaaaagaatggccatgtgaccattcttttcgtcttttttaataaaagcgaatccctgaagtataagcttgcgatttagtgattatttgccggcggcttctctgtctcttcgtttaatgttcttatagcctaagatccacaggggcagaataatcagtgcccagttgaaaatacccaggtatttgtaggcattttgcacgatccacattaagcccaaggtggaaaccaggtagcaaaccaccaaagaaaccacggcgataatggcttttttcttgaccaaattggtttcgttcttcatgacgtggggttccatgcgggtcacgatgccgaagataaagccgacggcggtggtgatcagtgccaggaagagcaggatcggataaaggacggagaggatcgaaatgtccaatttattgacgacggcgatggtgggcagcgctctggaggcttcgtctaaataaatgtcgggcatttgagagaagatcaaaagggtgatgcccacgagcatgagaatgttcatgatgcagccgatgatcatggcgcctttggcttcatttttgtattgaccgcctttaaaggatgcggtaatgccgccgatggcgctgatttggaagccggcataggtcaatgcccacaagagggagttgccgatgttgccggggacggtggcatccgatgcggaaatgccccacttggtagccttcggattcacatagccttcagagaagaggcgggcgatgtccggtccgaatttaatcaagccggagataataacaatagagataatggctaagatcataatggtcataatcgtggcatttttacgaaccagctcttcgccgaaaataaccagcaaggtgacgacgaccaccataaagacggagccgacgagaacgggcagccccaggtattgattcaccaaaagcccgccggatgcgatggtggcagccgatgcggcgatggtggtgatgatgacactgacgtccatggccggggtaaagattttggcgtatttgccgtaggcttccttggaccaggcatcgtagccccatttatccgtttgccgcgccgtttcaaggccgacataataagtaatggcgatcaggataaaagtaagaatcggcattagggtgccgaaccatccgtggtttgcgaagaattgaagttcttgcgtccccgatgcgaaacctgcgccgcagtgggtggagaaccacaccgtcgcaacaccgaagctgatggatgtaagataattgcgcttgtcgttattcacgatattcctccaatctaaggggttgcttctatttatagaaatagtatcacaaccgcccgcccttgaaaagaatcttttcaccgatttgacacgctttcttaggctttttccccctttttcgctccattttgatataatagcaccaatccaatcattttttattcaaggaggtttttatgtctgagaaaaaggcctttactctgggcctcatccccaagcttatcattgccattgttctgggtattttggtaggctcctacctgccggaagtggtgacgaaaatcgccgtcacgttctcggcaaacttcggtaagtttttgaacttcgtcattcccctgatgattatcgcctttgtgtccaagggcatcgccgacttgtcggaaggcgcgggcaaattgctcctcgccacggtgggcatggcttactgctccactttaatcgccgggagtttgtcctacaccatggcccatggcatcttcccctcgttcatttccacggaaatggtcgagcagatcaaatcggcctccgaaaagaatttaagcgccctctttgagatccctctggatcccgccatcgacgtaaccggcgccttgatccttgcctttatggtgggcctttgcgtgtcgattttacgtcaaaaaaacagcggcgacacgttctacaagctcattaacgaatttaacgaaatgattaatctggttttatccaaggcaattattcctttgcttcccttcttcattttcggtaacttcgccaacatggcctactccggcagcgtcttcgccattctctccgtctttattcggatcttcggctgcattttggttctgcacctgctttacgtcttcgccatgttcctcgtggcctgcacggcgacgaagcgcaatcccttcaagacctttacgaagatgttcccggcttatttcaccgccgtaggtacccaatcgtccgccgccaccattcccgtcaatgtggaatgcaataagcaaatgggcgtcagccgccaaattcgggaattctgtattcccctttgcgccacggtccacttgcccggctccatgattaccttaacggcttgtgtctacaccttgctctatatgtacaacatgccccacggcttcggcttgattattcaatttatcgccgtcttaggcgtggccatggtcgccgcaccgggcgcacccggcggcgcggttatgagcgcactgcccttcttgcccatcgtcggcgtggctaccaactcgccgatggcatcgattttgatttccctttatttaacccaagactccttcggtaccgccgccaacgtagccggcgacaacgccatttccatgctcgtggaaaaagtgtactacaaacacattttgaagcaaccgaaaccgacggaagaaagtctttcttaatgcaaaaaaccggccatgacagccggtttttttgtgcgaaaatttattcgttcatgagggaacgttcgtcgggatcgccgctaaaggtgacgacgcagacttccggacctgtgtgggcgccgatgacgcagcccacccgttggtcgatgtcgatgtttttctcttccatacccatctctttgattaaaaagtctttgaccagcaagacccgctcgggccagtcgccggaatagacatagacccgttggttgggattgaacgtaccgccgacggatttctcgttcaggtatttcttcagctttttcaaaaaggctttctgtccccggtacacgtctaaaagggccaaggtgccctctgctttgttgacgtcgagaatggggcaaagttgcagcacgccaccggcgattttcgccgtcttggacacgcggccgccgcgatggaggtattccaaactgcctacggtaaagaattcgtaggaggtggttttgattttgtttaagtaatcggcaatggccttaaggctttccccgcggtccctgaggagggcggccttcaaaaccaaaatcccttcgccgaaggtggcggttttcgaatccaccacttcgatttttcccggatactccttctccaaggcggcttttaccatctccgccccttcgtaggaaccggaaaggccggaggagaggctaatgtataagacctcgtctccctcttccagggcctttcgaaaggcctcttccatgacttggggcatgacgcgggaggtgctgtaggtggtgcctgcccgcatgttgtcgtagaagtttgaaatgtccatggcatggcccgtttcaaattcgttttctccgtcggagacggcgatgggcagctggacgatgtcgtatcgcccggtgatggtgaaattaatatccgcaccgtcgtcggtaaataattttatcatgagtcgctccttatggcgttgatttttctctttttccgccggaatctccctgcaggaaatttccgtttgtcattatattacgtgttacggcgtttaaagtcaacgagggccgcgccattggagcttttttatttttcggcacctgtaagctgattttttgccaacaggatcacgagcatggccacgccgaagaggacgatgctcccgccgggcttaaggcccaggtagtaggagagggcgaggccgccttcggtaaataggatgccgaagaaaatggcggcgacgtgggtttttttgtagctgagtttcaactgcagggcgcaggagacgggaagcaccaaaagggaggagatgattaagaccccgacggtgcgggcggaaatggccacggtaaggccggttaagaggacgaagatgccgctcagtcgatccacatggatgcctgccaggcgggcggagatgctgtcgaaggagaggtagagaagtcttctgtaattatagataagaaagagcactacgccacaggagacggcaaggatcatgtagaattcgaaatccgtaatggccacgatggtaccgaagaggaaggattcgaaattggccccgcctttgacgaagcccgagaggatcgatgccaggcccacgccggtggacataatgaccgccgtggaaatttccccgtaggaggggaagcggcggcgaatccattccatggaaagtgccgcggcggcgcaggtaatgatggcgcctaatatgggattgatcccgattaaaagcccgaacatgaccccggccaaagacacgtgggaaagggcgtcgccgatcatggccaagcgccgattcacaatcaccacgcccatggcgggaatgacgatggaaaggagaaggcctacgaccatggcccgtatcatgtaatcgtattgaaatagcgccattgactcacctcttttccaaaacgccgtcttctaagacgtaaatgccgtcgattatttcttccaccaaatgcaattcgtgggtaatcattaaaatggtaatgccgtgcacgtcgtgaaggtggcgcaagatgtggaagagctcttcccgcgccttaaagtcgatgcctgtggtgggctcatctaaaatcagcacgtcggtcatggagatcagggccttggcgattaacacccgctgcctttgcccgccggataaggcgccgtagaggcgatggcgaaagtcttctaaatccacgagggacagggcatcgtcgatgcggcttttgcgctcctcttcatttagcttttctccgtaaaggcccaaatccaccaactcttccacagtaatgggaaagtcgtaggaggcgaccatgagctggggcacgtagctgatgcgggaaaaatccgtgtcctttcccaggggcttgccgtcgtattcgatggtgcccgatgtgggcttctcgatgcccaaaaggagtttgattaaggtggattttcccgagccgttggcccctataaatgcgagaaaatctccctgtttaacagagagatttaccccttttaacacatcgtttttcccgtaggaaaatcgcaggtcactgacccgatagatttctttcattgcaatgcagactccagtgttttcagattgctttccatgcgttcgaaatagtttttatcgctttcgtattccatgggatccagttcttttacttgtgccccggcttccgatgcgatggtttgagctattttatcatcttcgtggggttccgtaaagacggttttaatgcccttggctttcatttcatcgacgatggtcttcatggctttgggatccggttccgattcggagttaatgccttcgatggggatttgatttaagccgaattctttggccaggtaaccgtaggcttcgtggctgacgacgatgtctttgtatttggctttggaaagcaccttttcgaaggaatcgttcaaggcatcgaatttttcgctgagtttttcgtaattggccttatagaaagcggcgttgtcggggtctttggccgacagggcttcgcagatattttttgccatttcttcggcattttccggagacatccatacgtggggatccatgccttcgtgttcgtgatcgtgttcagctgcgtcgtgttcgtggtcgtgttcagcggcgtcgtgatcgtggtcgtgatcggcggcatcgtgatcgtggtcgtgatcggcggcatcgtgatcgtggtcgtgatcggcgtcttcatcgtggtggtgatggtggccgccctttaagagctcgatgccttcggaggcttccacaaaggtggcgtcgccttctgtggtttctttaaagcgatccgtaaaagattccaggccggcgccgttgtagataaagaggtctgcctcgtttacttggttcatgtccttcggcgagggttcgaagccgtgaaccccttggcccttgggaatcaagcaggtaaccgtggccttgtccccggcgatttcttgggtcaggtctctgaggatgtaggtggtggtgacgaccttcaagccttctcccttgggcttttggctgtcggtggccactgctttgttgttgttattgttattgttattgtcgttgttgttggtttttgcgccgcaggcggtgagcatcaaggcggctgtagccaaagcgacgagttgttttattttcatcgtatcctcctaaatagaaatcattgttatttaacggatctaagtataccacttctccccgctttttgggaggttttatcataaatttttttcaccgcttttcttttttcttcccatggcttatgatggagcgaggaggtatgccatggaaaaattactgagagaaaaaggcttaaaggtcacgaagggccgcttggaagtgctgaagattttacaacaggcccgtgtgcccatgtgtgccatggacgtgtttaacgaaacgcagagggccatctgcgcctcgttgtccacggtgtatcggatattaaatcagctcaccgaggcggggattttacaggtttctctggagcaggaagaaagcacctattacgaaatgaagggcgatcatcaccactacatcgtctgcgcccgctgcggcaagctcgcccccatcgacgactgccccatcgacgccttagacgaacacattatgcgcgccacgggctacgccattacaggccaccgctttcagctggaggggatttgcccggactgcctgaagaaataaaacggaaccgcggatatttttccgtcggttccgtttttgttctctattcaaatgttttacgcctttttgccctgccgaatccacagggcgaggacgacacttgcggcggtgatggccatgtttaaaaggacgacgtgcctcggtgcatccatgccccctgtggccgtcacagcccccgccgcggcgaggaccacgtaattggcgagggaggaggccatcataaccacggaggtgattttccccttatgctcctcgtaaaggccgttggcttcggccaccaccagctgcaagacgccgccggcgccgccgtagccgatgaaaaagccgccgattaagggcgagacggggcttttcaccacgtaggtaaaggccagggccgcaaaacaaatggtcgggtaaaggacgaggacatcttccgtgtcgattttcttaagcaccacaaaggccgtggccaaaatggcgacgatggtgcccgcggcgtagacggattgaatcatggaaggatcattcatgccgtaaaggcttcccagctcctgattgcaattgagccacagggtaaaggtggcggtggcggtaaagcccatgagcaccacgggcgcgatgcctcggcgaatgcccgccgatgacttcgccttcccatcggctttttccatggcggggaaaggggccgtgaagatcaagaggccgtcggcggcgatgagggcgcccaaaaaggcgaataccgctgtgtaggagaaggtgcgggccgcggcaaagccgatcatgaagggcaggacgaattggcccaaggacatggcgaatttcgtaaacatattggccttggcgcctttttccttaaagagctcgagaatcgtcggcgtgacgcaggtgtctaaaaaggaattggccatgccgccgataatggccgcggcgtaggcggcggaggcggaggtgcaaaaggcgatgccgaaaaaatacagggcgtacaggaagacgcccacgaggcccgatgtctttcgcccccatttgtcggagacgtagcccgaaaggggcagggccacgagtcggcccaagcccagggcggcgataacctggatgacggcagaaatatccgccgcgccccaggcgctttgcagggcggttttgtactgagacaagatagatacgccgatgccgtgaataaagtaagtaaagtacaaaggcagggcggtgcgcaagacgcttcgattggattgcatggatcacctcgtaaatttttcaaaaaaaaagtgacccgcgggccacttttccggctttttcaagccgtctcgatggtatgccattccgatttttggtaagcaacagtaagtaagaaacaactctaagtaataaaacttatagctaggagtaagtcggcacgttcgcccatcgataggtatattatcacatgaattgccgattccgtcaagggttctttatctattgcccaccaaatttttacagatccataaattgacgaagggtgtcgtaaatttccctggtcatttcacgaaattccaccggcgtctgcttttcgttgacggaaaagaggtcgtcgaggaggtaattaaaggtaaccgagagcatgccctcttcgatttctacataaaaggccagctgtttgttttcgatgacggcttcaaagccgtagctgtccccgtctaagatgcggatgcactcgtcgtaaatggccacgagctcttcgaatttaaagaagctgtcttccgcctcaaagtccacctcgccgtctgtgccctgaatcttgcagattaaataatcggcactgaaacccgtacccacgccccagcccggctcgtactcgaattccagggcgtccacggaaatttcttttatgccttctcgtaagtgaaacatactatttctccttcgttaggcaaaagccttgttcttcggcgatttctataagagccgcccgattcgccgtggcgccttttaggcgagaaaccacttgcttggaaaaagaatctacccggcgattggcatccctgaggtcgtagtaggtctgcatttcttcgtcgtaatccttaatggcttccatgtaattgtccaaaaccacgtagctgtctgtgaagcacttaagatccatggacatgcggggcttcagctgcggcgattgattgggatggccgaaacctaaaccgaaaacggggaaggtgagcttgggcagatttaacagctcgatgacggcgcgggcgtcgtttaaaatacttcccagatacacggcgccaagccccgccgcctcaatggcgttggtgacattttgtgccgcgagaaccgcatcggtgacgccttggaagaagcgatcgctgtctgcctcggctggaagttccaccccttgttcccgggcgatgcggctatttctgtagacgtcggcgacaaagacccacagctccggcgcccgggcgatgtattcctgcccgccgatgtcggccagggcctttttcttcgcctcatcgacgatgcgaataatggaataagactgcatccccgtagaggtggccgtgcgattggcgacgtctttgaaggtctccaccaatgccggatccaccggcgcatcggtaaattcccgaatggtcacgtggtttaatggtctatcaaaaagggttttatctgccattacttcctcctctgtttctctttcagtcggcgaatccacaaattgccgatttccgccgtggattccatggttttaatctgcatacgcaataggcctttgagggactccgccaaagcggcgtcttcttcgtttcccgcggttttaaacagcccgccctcgtcttttccgtagagctcgatgaccatttccccggggcctgtgacatcggcgtgttccacttccacgaccaagggctttttgtccgcgggcaaaaggacgccgggggtgcgcatggcagggagattcacatccccgccctcggcaaaacttccctcggcctccgataaatagacgcccctatcggtgatgccgtcgaccaaataaaagcgccgcccatcgcccatgagccataggccgtctcccgctttcaagcgcgccaaataagccgcctccacgggcaaaaagcccgtctcatccggcagctgatccgtgtgtaaataataggcccgatttctctcgcccatgccatcccccatttgtaaatagaaaaggtaccgacgttggccggtacctcatgcattgaacgcttattttgcgttttcgttgatccatttcatggattcttttaccgcttcatccgtcgggatttcaacgccggtttccggatcttttccggctaccttaccgtagatgtccgatgccggagcgtgtttgtcgttttgattttcttgttctcttcttgcttttgctttttcttctttgttagccactatagcctcctatttgtgatacacatggccggcgtgaattcgcgcagctcgataaatctgttccattaaaacgacgcgcatcaatgtatgtggcaaagtcattttcgaaaaggacaagagccaattcgcccgcgccttcacggcgggagaaagacccatgctgcttccgatgacgaagaccacgtccccggcggttgtttcaataaaatcgtataatttttcggaaaaggccggtgaatccacctgctttccctccacggccaacacgattaccgtatcccgcggatttatttttgccaaaagggcctcgccctcccgctcaagcaccccttgtgcctctttttcagataaactttccggcgcacgctcgtctttcagctccaccacctctgtgggcgtatagggccgcaggcgcttcacatactccgaaaccaaggcgctcagggcgggatcttttaattttcccagggccagaacctttagttgcaccttagatcagcgccttcactgcttcaagggctttgtcgtaatccgggtgattggtcacttcttggacgtattccacgtattttaccttgtcatctgcgccgacgataacgatgccgcgggttaagaggcgcaggccttcgattaagaagccgtatttgttgccgaaatcgcagatttgatagtcgctgacgagtttggcgcggtcgatgccttcagcggcgccgaagcgttcttgtgcgaagggcaggtcgttggaaatggtgatgacgtgcacattgtcgccgagatcggtggccatttgattgaagttgcctgtttgaatggagcaaacgccggtgtcgatggacggtacgacggaataaatgcgtacggtgccgtttaattccttggattcaaaggggcttaaatcgttgtttaccgctacaaaatccggcgcagtgtcgccgactttaatttctttacctaaaatgttgatggcgtttccgccgaatgtaatattttctctggacatgatgtacctcctaaagttcataaatcatatatcttatgtatatcctaaaattcgggaaactaacagaaaatctgccggagattttattttttccgtcttttgcgccaaatgcccgacgatgcggtatgatagtaaggagataaaggaggcattatgaccctacaagctaccgccctcgtcttcgacgggcacacccccgcagccttggccgtcatccgaaacctgggccgccgcggcgtggtttttcgcaccctggacgcggcgccttccgactacggcatcagccgctacgtaaaagatgccgtgctgacaaaacatcccggcgacgacgcccttttagaggccctcctcgccctttcagacggccgaccggtgctctttcccacatcttccgcccatgtggattttatggcgcggcatttttccctgctaaaagaccacttccgcttccccgccccgacggccgaggccctgtcctccgccggccttaccgctctttttcgcgaacttatgcccccggaaaaaggccttaataaagcgccggatcaattagtcatcgacatcgccacgaccctgggctttccctgcttaatcaaatcccgccacggaaaaaaagaggcgccgattcaatacatccaaagcgccgctgccttttcccgtgccctcgagaaaatcgaaccggcggatttctacgccgagcgctacgtgcccggcgaggcctgtgacaattacaccgcctccctctactacgcggaagccggcgaactttcgggctttgtcacggcgcaggtgctgcggcagtaccccgaatttgtcggagaggccacttatttgaaacagaaatggattcccgagctcatcggcctcgtccatccccgcttaaaggcatcgggctttcgcggcattttccacgcccactttaagcgcgatgaatttacgagaaaagtctacatcaccggcgtgagcgcatccttctccccggagacggagctttacacccacctgggcttcgaaaccccctacctctattatttggacagcctcggcgaagatgtgccgaaggtgttctttcaatcggacaccaattgccactttctcgacggctggcgagacatggccggggtggcgggttacatcaagacgggccacatgggcctgatgaaaattctcggcgactacaaattcagaaaagtccccgccacctgggcctgggacgacatgggcccggggctgaacaagctcggcgccgaagccgccaaaggcgcgaagatcctttacgacaagcttccttttcatcaataacgacaaaagcacccaaatgggtgcttttatttgttctcataatgatgggcgcaggacaggataatcaaccactcctcctccaccttataaatcaaccggtcttccgtattgatgcgccgagaccaatagcctgtcaattcatactttaatggctccggcttaccgatgccctcaaaaggcgtccgaagaatgtccttaataagcaaattgattcgcttcagcgtttttttgtcctttgtttgccacgaaatatattcttcaaaggccccgtcgtgaaatgcaatcttcatctactcgtccaataacttctgttccttaaaaagtccccgttccacctcttcggctcggcgaattaactccttgtagtgaaccggatctttcataatatgatcgttttcgacgagattattgtaggcttccaggctgatcatcaccacgtgacgatcctctttccgcgtcacgagcaccgtctccatgtcgttgaccgccttgtcgcaatactccttaagattgttgcgcaaatcgctgtaattaactgccaacatcttatcacctctttcgttcattgtacaagatcttgtacgtttttgcaatcctctttctcaggagtaacaaaaaacgacgcttgcttttttggcaacgcgtcgttttcatttggcggagcgggtgggattcgaacccacgtgcccgtgaaggcaaactgatttcgagtcagccccgttatgaccacttcgataccgctcctcgcatattgacttaacgaatctattatacaggatttattcctgttttaaaaggtcgtttttcaatatgccccggtttacagcttgataaagtccaagggatttttcgccacgccgccgacgcgcacttcgaagtgcaggtggggaccggtggaacggccggtggagccgattattccgatggattggcctttttgcaccacgtcgccgactttcacgttataggcgcttaagtgagcgtagcgggtggaggtgccgttttgatgatcgatgatgatgaggttgccgtagcttcccgccatgcccacgcgggtgacgacgccgccgtctgcggccacgacattggtgcccgtggcattggccaggtcgacgccgtagtggaagcggccccagcggggaccgaagggggaggtgaggcgaccgacggtgggggtcatgaagctgcccgtagccaggccttctttcgtgcctacggcgacgatttcatcgacgggctcctgaatcagacggctggattcggtgacggaagaggtgattttaccgttttccgatttcacgcaggtggtggtctctaagagcccggctttgcccgcctgtgccacctttttcacgctcttcacttgattgggatcttccttcgtcacggttttaaaagcaaccggtgattgggccttcatttcctgctctaaggtgacggtgatcataggcgccggtttcaagacggtgattttcgatcccttgtgcaggggatcttgccaattggcgtttaaggccttgatttcatcgacggtcatgttgaatttctcggccacggacgccaaagattccgtttcctcggctacataaaccgcctcttcccggccgccggttaagagaagcttgaaggcttcatctacggtgaggatcttctcttcggtcttcacggcttcggccttgatttcaggttcaatggccatgcggcgcacggtggcgccttttgccttaaaatggttttctaatttcgccatgagggcgtcgtaatcggcggcgttttttaagtaaaagactgcatcgccgacgctgaccttcacggcctctgcggctttttccgcttccgcagccatgggcgtgggattttccgccgctaccgatgcagcaactaccgggctatgcaccatgcctgccgccatcactgccgccagggcgcctacattaattgttcgtctgatcttgttcatgaatgtctcgctttctctatggatttgaagctcgaggcttctttcgttactattttgtaactcttttgagcacgaggtttattataacagagaatccgccaccgtctattgcctaaagactacaaaaagatgacagtttcatgacaagatccgtacacaaaataaacatcccccggcgtagccgggggttttcctttttcggcccaaagggcctgcattactagctgcgcctgaagggcgtcggtggtctgcccgtgctaacattactcggctaccccttaaaggggttcgtcgtgtcaaaggttagttgctcacttatttgatcttctttcagctgattttgaatgtattcctgaatctttttagcgttttttcccgctgtatcgacgtaatagcctcggcaccaaaactgccttcccctatatttaaatttcatgtctccccatcgttcatagatcatgatactgctcttaccttttagaaagcccatgaatg

SEQ ID NO: 42 - DNA, 41271 bp, Peptoniphilus rachelemmaiella
  source 1..41271: mol_type = genomic DNA
gcacttggttcgtccggtgacgatagcaagagggacacacctgtacccatgccgaacacagaagttaagcctcttaacgccgatggtacttggttggtaacgacctgggagagtaggaaattgccggtcacacaaaaaacgcacgctgatcttaggacggcgtgtgtttttttgtacttaaatatagaaatagtggcaacacacgacagaagaggcaagcctctggccgtagatggcaaccgggcgacgcgcttcgcacgtcccgccgggccatcctgacataggacctaccatccatttttcgtcccttcggtccgcaaaatggggttaggtctctaaacgccgatggtacttggttggtaacgacctgggagagtaggaaattgccggtcacacaaaaaacgcacgctgatcttaggacggcgtgtgtttttttgtgcgtgtaaaagaaaaagagggctaccgttttaagtgcggtagccctcttttcaggtacactgacgagggatctcttttaagtgtcgtagaccagatacataataagcagattctcttcatccaccaccaaggcctcgtagttggacagataatcccccgccccgcccggggagcgatccacgaagtagtagcggcattgaggccaagacagggcaggcgctttaattcccggttgcacctgtttcgcccatttcaacgccgagtccacatcccttccgacctcgctctctgcggaaaaagcttttgcctttttcaaatcctgattcagctgcgccatgtcctcgccatttaatttgtaaaccgaatagctcacgccgtcgccgagaaaatccggcggcttttttacagcatccacgcagacggcccgcctcgtgacgtgggtaccaaaagcagcgtttatggccttgagcgtccggggcgtggcgtcggaaaagataaagatcgccgcgaggcccacaagaaagagggcgcctataattttaagtcctttagtccgcgtcatgttcatcgtctccttcgtagcgcaaaatatctcccggctggcaatccagggcccggcaaatggcggcgagggtagaaaagcgaatggccttggcctttcccgtctttaaaatggagagattgggcaagctcacattcaccgcctgagataattccgtgagggtcatttttcgtttggcgagcattaaatctaaatccacacaaatcatggcacacctcaaatggtcaggtcgttttcttcccgcagatggcggccttcgtctaccgcatcggccaagaggaagaaaaagagggacgccgccgcgaggagggcagccaaaaggaaaaagagcagaaagagggcggcgagctgcaggttcacggccaagtaaatggcgagaagcaaaaagctcaggcaggcgcctaaaaagcacaggcccacccgctccaggccgcgaaccatggccggcgtaaagaggcgacccttggcgtacaaataggtggtgtaaaggccgaaggcaagccccgcgagaagaaaggcgccacttgcgccccaaaaggcgaggcacgccggaatcaggggaacgaaaatggtaaatgtgttgtctttaagaacccatgcctttcctaaaatggatccgatgagagcgaagaagccactcgtcgatagcatggccgccgctaaagtcgcggcgataaatgtggtttgtaatcgtttcatgtcaacctcctgctttcagtatacccgaaacttatcgataatcaataaatatttatcgaaaaaagcaaagaaacgtgaacgaattcgccggcacaggctaaagagtcgcagggagggaatcgaagaagggatgagaaaagaagggaacccatcggcaggttggggaaatagccacatccgaaaagaataaggagaagatgggaaaatcgggaggcaaagaccacgggatcgcagacaaggtagggtgattaaaagcgaaaaccaaatatccggcaagataaaaaccatgggtccacaggcacaaaggacgattaaaaagaaaagcggaaaaaaagtcgataaagccaaaagaaatccgagcgaaaaatggcggaatcaagccgaaaaagagaccattgaaaataaatctcaaaaagtttcaaaaaacccttgcaaaagttccgaggtaccgctataataatcaatgtaaacgatatgaattatcaaatcatttctttgcggtacatatcaggtgattctgtcgtttatgccaatgcgtgcagcgtgaacgtgccgcaaggtagaaaggagggaattatggtacctgtcatttattggtcggggaccggcaacacagaagccatggcgaaggcagtcgtcaagggcttagaagccgccggtcaagaagcttctttaattgaagctgccgacgcaacagaggccatcgtaaaggatgcggaacgaattgcattcggatgtccggctatgggtgcagaagagctggaagaaacgacaatgcgtcctttaatggatgatgtaaatcctctgttgaaaggaaaatatgtgctactgtttggctcctacgattgggcggacggcgaatggatggaaacttgggaggacgaagttcgaggactcggccccgcttacgtcgccaccgtcatttgtaaaggagagccggatgcagacggcttgaaggagtgcgaagacagtgctcgcgcattatgtgaagcgtaagctcaatgactccacggttcgttacctaaacaaatgcgatacatgcaacgatcgcgactatttggaagcaatcttaaaagcctatacggcgcccacggttttctgcggaaaaaccggaactctggttaacttagtcaatccttcaagagatcttagccggtgttgggcccaggacgaaagtatcaagcgtgccataccccttgcgtacgcggaactgaaaaaccccaaaggcagtttgcttctctacttctatgatcgaaaacgacttgaacacagactaacagacaaacgatgccgagctttcttaaagaatcgcggctatgattacgccaatgcggacgaagccattgcggaattaaaaacacggtttttaattggctgtcccgacgaaatcggcatctttctcggttaccccgtctccgacgtggaagcctttagccaaaggcgacgccatcgattcgtcggttactggaaatgctatgaaaacatcttgttatcgaaagtgcgctttttcttatttgacttagcgaaatattttgtcatgaataaagcgatgcaagaatactaaaataatgacaccttcctatattctgaatgaaagcggacgctgaggcgtccgttttttcatggaaaatccccatggtttgaccatggggatttgtatttggcgaaagctcactcgagggcccggggcaagatgtccagcaagtagcggcgcacggcgctaatggcgtcgttgctgtgggcagcagaattttcgcagaacaccacgcgccaatccacggaatcttgaatagggatcatgaggagattgttcaccatttctttcgtaaagaagtcccgcacgatctcaggcatcaggcttatgtagtccgtgccgatcagggtggtgacctgaaagtcccatacggatccagccaaggccacgcgcggctccgacccacgggcgcgaagggcgttttgtattaaggaataggtggcgtagcgattgcccgggatggagagggggtattgggcgatgtcttcccattgcaaaatcgtttttgcagcaaggggatggtcctttgaaagaatggcagcaaattttcggtgatcgattcgcgtcgtgcgaatgccgacgctgtcgaagtcgttgggctcggtcatgagggccatgtcgacgcttaggtttaacatcccttctttaatggcctcctgatcgtattcgtgaaagataaattcgaccttcggaaattgtgcctgcaacgaaaagagtatggaagccatgtaggtccgcaagagaaagggcggcgcggcaatggatacggaatgggtgtagcgattgccgatgcgctgcagctgatccatgattttttcgtggcgggccaaaagcagcttgccctcctcgtacaaatactttcctcccggcgtcagggcggtgtagcggcccttgattcgttcgaagagggagagcccgctttcccgctccatggtttttacggcgttgcttaaagccggctgggaaataaataaatcctgggcggccttggtaatattaaaatcgtgttcgacgatggcgataaaataggcgattcgttggagatcgatcatggcaccctccataaataaaatgcaaattacatataagttcagattatgaaaaccattacatattcgtctttttcataacaagtggctcttgatacactgtttatagttcattataaacaaaattcaacgagggcgataggcattcactctattttttatggtcatccgcggcaaaatcgccgatttgccatatcgtcagattatggaaaggtagggattattctatgggagctatgggcttattgatcgctctggccatactggtggtcatggtatttaaaggctatcacgtgttgccggtatccttgttcgcatcgctggttattttcttgttcaaccgtttcgacatttggcccggttttatggatggttacgcgccggccatgacgggatttatcgcaaattacttaattatgttcctcctgggatccttggtcggcgagcttttatcgaaatcgggggcggcgtcttccattgcggaaaagttcacccaaattttcggagccaaacacgcattgctgatcgtcgtcttgtcgtcggtgattttatcctacggcggcgtatcggttttcgtgattatcttctccatctatcccattgccctggtgcttttccaagaggcaaacattcccaagcgagtgattcccggggccattatgctgggcgccggttcctttacgatgacgaccctgcctggtacaccagcgctcacgaatattattcccacaaagtatttgggcaccaccaccacggcggcgccgatgctgggtgcgatttgcgccctcattatgtttacggtgggcatgcttattttcacggcctacattaaaaaactaaaggccaacggcgaagtattcgctctgggagaaaaagataaagccatcggcttaagcgacgtcaatatggacgacctgccgcccttcggcctttccgtcatccccatcgtcgccatcgtgggcacaattctcgggattcgcttctccggcatcgagatcgactccgtgtattccgtggtcatcgctcttctcttgggctcgattttaaccttccttctgttcagaaagcgcttaacggaaccgaaagaagccctgcgcacggccagcgaaggctccatcagcgccattatgaacacctcatccatcgtaggcttcggcggcgccattcgattggtaccggcctttcaacaattcgtcgcctttgccacgggcctgtccttccaccccttgatttccgcggcccttgccgtaaatattatcgccggaattaccggctcctcttccgccggaatcacgatctttatggacagtatggcgcaaaactttttaagcatgggcatcgagccccaattgctccaccgaattggcgccatggccgccggggtcttggactccctgcctcacgcaggccccaacgtgaccttccttatggtgacggggttgacctttaaagaaggctacccgggcatcttctttgccacctgcgtcgtgccgttgatcgggctgatctgcgccctgatcctggcctttatgggcgtttgttaatccccttgtgaaaagaaaggacagtttatgaaacgaatcaatgcaaaggaagcggcagcccttattaaggacggcgacggcttaatcgtctcgggctttttgctccaaaccaccccttctgaactattaacggccatcggcgagcgcttcgaagaagaaggcgcgccgaagaacatgaccgtgcttcaggcggcgggcataggcaacaacaccgacgagggcatttacgaaatttcccatcccggcatgatcaagcgctacattaccggccacttcgcaaacaatcagcgcctcatcgaccaagccaatgccaacgaaatcgaggcctacaacttccctcaaggcgtcgtttcgaaaatgtatcgcaacatcgcctcgggctttcacggagagctcacgaaagtgggcctgaagaccttctgcgatccccgggtggaaggggccaaaatcaacgatgcggcgaagcaagatttggtggaactggtcaccttggataacgaagagtacctttactacaaggcgccgcaaatcgacgtagccttgatccgcggcaccaccgccgacgagctgggcaacatcaccttcgaagaagaggcctcggtggtggatgcgcgggaaatcgccatggcggcgaaagcatccggcggcaaggtcatcgtgcaggtgaagtacatggccgattcccgctccatcaatcgcaacgacgtgatcatccccgggatttttgtggactacgtggtcctcagtgaaaagccggagacgaagcatcgccagacgccggcgaatttctacgaccccgccattgccgggcaatctcgcgtaattatggaagaagcggcgagctaccccttaaacgagcgcaagatcatcgcccgtcgggcggccatggaattggccccgggcgacgtggtgaatctgggcatcggcattcccgaggtcgtgggcatcgttgccaacgaagaaggcttcggacacgacattaccctcaccttggaagacggcatgatcggcggcattcccctgggcggcgccaatttcggcgcggcggtcaacgccatggtgggcctgcccatgaatcagcaattcgatttctacaacggcggcggcctggactgcgccttcttgggctttgcggaagtcaacgccgggggcgacattaatgtgagtcgcttcggcatgcgcattgccggtgccggcggatttatcgacatttcccaatcgacccaagacatctacttctgcggcaccatgaccgccggcggactgaaagagcgggtggaagacggcaagctcatcatcgagcaggaaggcaagcgcaaaaagtttttgaaagaactggatcagatcacatacagcgccgagcacggcttggagatgggccaaaacgtcacctttattacggatcgctgcgtcatgaagccctcaaaagacggcctggtcattacggaagtggcgccgggggtggatattcaaaaagacatcatcgatcaaatggaatttgaacccatcgtcgccgacgatgtaaagcccatggatccgattattttcaaagacgcacccatgggcctgaagcccgcccgcagataaggaggagaaaatgaattacgaaccgaaaggactgtatttagaagagtttgaaataggaaaagtctacgtctcccaagggcggaccattaccgaggccgacgtcgccaccttcgccggcgtctccggcgactttaacgtccttcacaccaacgatgaatacgccaaaaaaggcccctttaaagagcgggtggcccacggcatgttgggtgcgtcgattatgacgggcctatccaatatgatcggcatttttgacggcaccaccgtcgcctttttggaactcaccattcgctacaaaaatcccctacggatcggcgacaccgtgcatctggagctggagccggtggaagtaaagcgctcgtcgaaaccggggcggggcgtcgtgaatttcgaggcccgcctggtcaatcaagacggccttttgattacggaatccccctgggcgattatgatgaaggcaaaagcataggaattatttggtcacaggagatgtcggcgcgtgccggcatctttttttgtgcgcgaaaattcgtcggtcgaagaaaaatttcaaaaaaagagttgacactgtattaagacggcgatacaatatgactgtattaaggaagtagcacaagtgagaggagggaaagatgagcctaatggatgtgacgtccttaaccaaggactatggaaatggaaggggacttttcgacttctcgatgcaattaaatgcgggtgacattgtcggccttatcggcgtaaacggcgccggtaaaacgactttattgaacatattggccggcctcacgcacgccgattccggaaaaataggctacgaaggcgaagaggtcgccatagattcgttgcatcggaaaaagttcggcatctccgttgatccaaacttttatgaatacatgacagcgtatgaaaacttggaatccattctgtacctaaacggaataacggatgtagaaagaataaatactgaaatcaagggcgtgctaaacacggttggcttggaaggggtggagaaaaagaagattaaggaattttctttcggaatgaagcagaggctcggatttgcacaagccttgcttaacgcccaaaccgtcatgcttttagacgagccttttgtgggattggatattcacggccgtgggatggtaaaaagcctcattcaggagatggcagagaagcagaaaatggcggtgattttttcggaccacaacttagacgaagtgaagtctttatgcaatcgtctcattgtgattagagacggagttaagcactatgatggtgacattcatattcaaagcgccgtcatgttgaatgttgacgacacggataaaatcgatagtcgttacgcaagaaaattagatcggcataggctggtgatcacagaggaaaacatgaacgagaagctacactacattagctcgatcgctaccatattgagtgttgaaaaggtaatcaatccattggaaaagttgctggaggaggggaatgatgaagacgcttgtacggttcgagctatttaagcagttaaggcgaaaagagaatctgctggtgttcttcatgttcctattgcccttgttttacgggttgggcgtacacaatcattcgttgattgtgacgtataacagcaaggagctaatcaatgggctaacatttgccgacaatatgtacaccttggtttatatggtcttcgttatatttctcattctcgccatcaacagtgcgaatatattaaaaggagaaattgaaaacggaagtctttctatgatgctagatcgcgtcaataacaggcgcaacatctaccggtcgaagttttatgctcaatccatttactggtgggccgtgacagcgctgttcatagtattttcgattggatgttattatttgctggtggcgaatcttccaatagccgacggaaaactgatcagtgcgcattatctttctgatctaatgacgatcgttgcaaccggttcgttgtatatactggcgattagcttagtacaaagtctcagcatgtatgttaaatcccacgtttccatcggcgtatttattgttttgtttgtcgttttcgtgtatttaaaatcattcccggggatacaattgggatctcccatgtatcacctagagaaattgatagatagcggaaagggaatcgattttatttggtttatggcactaaactggggattggtcttattattgaacaccataggcataaggaaatttgaacgaagtgatttgtagaagaagcagcacagatgaaaggagggcccatggaatttgacggcaatcgaccgatttatctgcagctttacgaaactattcgaaagcaaatcgccgccggggagctgattcccggagagaaattggaatcggtgcgaaatttggcgaagatttacggtgtgaatccaaacaccgtgcagcgggcactacaggaactggagcgggaagcgctcattgaaacggatcgaacgcgggggaaatttgtgacggaaaataaagacaccatcgacacgttgggcaaggacgcctttttcgacgcctgcgatcaattgatcggcgtggcggcggatctgtccatgtcccaggagacagcggtaaaattactgaacaagcgttgggagaaaggagggtctcatgaaggccgttgagtgcaaacaaatcgacatcgactaccggggcaaatacgtcttggacaaactggaattatccttggagccgggacacatcgtagggcttatggggcccaacggcgcggggaagacgacccttcttcgcattttggccggcctggagatgagctacaagggcgaggtggaaatcttcggcgaagcaatcggcaagatcacgaaaaacatggtgagctaccagccggatcacctgcctctgcccaaggacttaaccgccgaggcctgcgtggatctctacggccacttcttcgacgacttcgaccgagagaaggccttttatatgctgaaatccttcgacctggagccttcccgccgcatacgggaaatgagcaagggcatgcaggacaagctccaagtggcgctgaccctttccaggaaggcgcggctctacttaatggatgagcccatcggcggcgtggatcccctggcgcggaagaacgtcatcgatggaattttagacggcttcgacacggaggcgaccttgatcatctccacccacatggtggatgccattgagcccattatcgacacggcagtgtttttaaaagagggcaaggtgcttttaaacgaagatgtggaggccctgcgcggccgctacggcaaggatttggaagcgattttcagggaggtgtacgatgtctaaactcatcagctattatttcaagcgagacaaatggattcttctcgccatggtggcattgagccttcccggcggtttcctcttggggggttacactggagaagagagcacggtcggcgccgtcgccatctttgtcggtttcacggccttttttatcggcgtgagcatccttcctctgtggctttgtatcagggattacaagcgcatgtacggcacctacggcagttttttcgcggcccttcccttgacgggaaaagaggccatgggcggccggggcttgtggtttatcatcgtggtagtagtggcgtgtctgtgttctttagcctatttcggacccatagtctttcgtagcgtaagagaggaaatggaaatatgtcgattttttgccgccctattcgaacaaccgaacgtcaattactcggcgggcttcgccttcatggtaatcgctggcatgcttttagccgcggccgtctgggtcttcgtcacgagtgtggggagcgaaaagcccttccgccgcttcggcatcggcgggcccattatgctctatgtcggcgtgcaaatagccatgaacgttgtggtcagtacggtaatgaatgtgatgggaagccaaagagtatttataaatgaagaactcatggttcaagaagtcgccgggctgttcttcagaacatctcttgtgttgagcgggcttatgcttatcgccgccgtggtgctctttttgagaagcatccacagccacgacaagaaactttccgtgtcataaaaatgtaacgagcgaggctttcgggcctcgttttattttgcacccattgttgataaaatagttttgtaaaacagattggagggaaaggagggcctatggggtttaaagtctttatggctttcgccgtatttttaattcccggaatcatgatcttttttggtcgcaccatgatggatcatccgccgaaaaccattaacgcagcttacggctatcgcaccaccatgtccatgaaaaatcaggacacctgggactacgcccaggccgcctgcgccaaaaggtggcggagatggggcaggatcctcgccctgatcaccctcatcgtgttgattttcgcccttcgccgcccggcctttgccgatgtgttgggcatctataccgcctttgaaaccgcctacctcttggcctccgtggccgccacggaaatggatctgcgccgcaccttcgacaaagagggccggcggaaggcgtagggcgtgcttgaacattgtgcttttctttatcctgtgttaggctaaaacaaagaaataatgaatggaggatatgatgaaacgaatttgtcgattgttggcggtcctttttctcgccacggggctgattttgcctgcccgcggtgcctttgccgcaagtcgggacgaaaaaatcgcctacttacaaaaagccggcgtggtgaccggctatcccgacggcactttgggcctggatgcgcccattaagcggtcggaaatcgccacattgctcgtaaaaatcgacggcaaacaagctgaagccgccgaaaaagccgcaatttttaaagacgtccccacaagccactgggccaacggctttattcgcgtggcgagccaaatgaaaaatcccggcggcgtcagcgccattatcggctaccccgacggtaccttccgcccggaaaaacacattaccaatgccgaaatgatgaaaattctcgtggcaggttccaaagccgacctcaccctcgccgacgcagccaaggccgattggcccgcaagctggatcaattgggcgcgagagatgaacatcgtgggccccggtgcaggcatcggtgaattggatcccaacaaatccgccacccgaggcgatgtcttcgtcatggtctacaatgccaaagtgaaagagcaaccgcccgcagaaatgccgaaggccaacgaagaaaagcccaaggccaatgaaggggaagaaaagcccctgaaggatcaggatcccttgaacgccgccaatcgcggcaatgccttccacatgatctttaacggcacctgggcgaaaaatctgccctttctgaaaaaataaatccattgaaagccaatgcctctttcgggccttggcttttttcgtgggaagacggtaaagagccgcaaaaaaagatttgaagatgaatttacataaataagaacatatttcaattaaagatggtataattcatttatataaataaaaaggaggtagtaatgaaaagacagatgaagagacaatggacggtgctgcttttgtccctggttatgaccctggctacgggcttcagcgtattcggcgcaagctacccggatcttgccggccactggtcggaaggaaccatgatcaaagccgcggatctcgggtggatcaaaggctacgacgacggcaccatgcgcccgaatcaatcggtgacccgggcggaatacatcgccatggttcaccgcatggcgggcctggaaaaagtaggcgcgaaagcacaatcggcctacggtgatttaaatcaggcagcttgggccgatacgacgatccgccaagcggaagaagcgcagctcttggatttggtctttttaggaccgaacctgcgccctaacgaccccattacccgcgaagaagcggcggccgtgctcaatatgggtaccatgctcaaaaatatgggcgcacgatccggtctgacgaaagaaaatgtagagaccatccacaattttgctgccacgctgacggaaagatacaacagcgccgacgccctgagctatagagacaaggcgaatgtgacgccgcgctacgcctgggccgtcggccaattaaccgacggcaaaatcattaccggctacgaagacaacgcctttaagccccaaggcaagctgacccgcgccgaagccatggcgctgatcctgcgggccacgggccaagtgccggcaccggtggaaaaaccggagccccaacccacgcctcaacctgcgccgcaaccggcaccccaaccgcaaccggcagcggaccttgtgggcaaagtggtacaggaagacggaaaattctacatcgtcaatgcaaaaaccggcgcccgcttcagtcgcaacgcctttaaagacggctacgttaccatcggcgatcaagcctacctgctcggcccggacgacgccctcacctcgggctttatccgcagagacaacaaaacctactacatcgaccgtgaaaaaggaaaagttcgcggctggaaacaagtgggcgacggactctactacttctccccggccaactaccgcatgtacaaaaacggtatgttctccaccggcgaaggggtgtactggttcggccaagacggcaagctcaagatcggcaagcgccccggcggccaacacggacgcaaagtttactgggcaggcccctcggcgaaagaactggaaaacggctggctcaccggccccaatcaggaacttcgcttcagaggacaggaaatcgctaactacgccgccgccttcgaaggccaacccttccgctggtacggctttgaatttgacagcggcaaaggcgtctactgcgtcggcctcacctacgccgcccacaaggccttcggcatccacatcccgggccccaacgacaccaacattaaactgcacagaggctacgaactgccccgcgtgcaatacgaagccgcctacaaattcggcggcatgcgctatccggccaactttgccaacgcatggcccggcgacattatctttaactacagcccgaacttctatttaggctacaaccacgtgggcctgtacatgggcaaaaacaacggacgggatatctacgtccacgccacgctgaaaaacggcatctttgtcggcgactgcagggaaatgaaccgcgaaatcggccgccgcttcaacaaagaattcgtccgctacaacacggataaaaacaaaggcaacggccaaatccccgaaatcttgcgccgtcaatagttgtaaagaaagaaaaacccgaggaggatctcgggtttttctctataatcggccattgtatcgacgaaaaagatggacagatttcaatcggtagggtaaaataaagccttctgaaattctaataaaggaggatttttatggaaatgataaaaacgggccggccgccgacgtcttggcgggtattaaacggcgcccaattaaaatacatcgcctttttgtccatgctgttggaccacgtcaacaacgcgctgattacgccttatttagacggaaaggggcctttgctccatgtaagcaatcttttgagcattttggggcgaatcgcctttccgctctttatgttttttctcgtggagggctttttcaagactcgctcccgaaaaaaatacctaatcaatctcttgctctttgccgtcgtatcggaagtgcccttcgatctctttacctcccgggagcttttcaataacaactggaacaatatgatgttcactctcgccctgtctctcgtcactatttggatcgtggatgagctcaaggggcggctgtcgaaaaagtccgcggccctttggtacggggcatccatcgtcgtggtggcggctatgtgtgctgtggccatgttcttcagcctggattacgattaccacgccattatcgtggcctatttgttctatctcttttacgaaaagcccatctacggcgcggccctgggttatctctccattataaaagagctttattccgtcctgggctttgttgccaccctcacctacaacggtcagcggggcaagcagtataagtggctcaactacgccttttatccggtgcacattctgatcttgggccttctccgcgtggcactgaatatttaggggaggaagcatattattgatccgatgaacaaataaggataaaatgactcaaggaggatttgctatggttacgacacatctcgattacttaacggaaagtggttacggtagcgtaccgagcatggcccataatgcggcgctctctgaagatgtagaaacgaaattggatgaggcggatcgcatggcgaaggagacggcgcttcgctacgacgccgatgaggtcttcggccgcgtaaaggcgcggatttgcgacagtgaaagagcataggtcatcctcatggcgtaattttaatcccggcgaaaacaaataagctatctgtttaattccaaaaccaccatcccaagcccgtcttgggattttttattccttaaaattccttgcattctttcctgctttttcgtccttccccaggtataatagggacataggttcttcggattaaaagggaagttgcttgcggcacgcggtcccgccactgtaacggccgagacgcccattcacttaacgggaaggatggaacgtcgcctgaggtcagaagtcaggatacctgcctatggaaaaaatttcttcacgaggtatggagttgtccatacaagataggaggtctttatgaaaaagattctgaacgtcttgttgctcgcgtcgttgctccttttaaccgcctgcggcgggggagagaatgtcgccaagaatgaaaacaatcaggctgcggccaatacgaacgccgcggcggaaacaaaggatgcttattatccggtaaccatcgagacggtggatgcccagggcaatcctgtcgaggaaacctttgaaaaggaaccggaacgggttgtggccgtgtatcaatcggccattgaaaacatgctggccttgggcctcggggacaaaatggttctcgccgctcaattggacatcgacgtcaaggacgagtacaaagacgccttcagcaaggtggactatgtaaaagacgcgccgtcgaaggaagcggtcctcgccgccaagccggatttcattatttcctggtcgtcttatttcggggacaaaaccctgggcaatgtaaaagactggcaggataaaggtgtgaacacctatattctgaaaaacagcggcgccgtgaaggtggacagcctggaaaatgaatacgaagatattttaaatttaggaaagattttcaataaacaaaaagaagcccaagccatcgtacagtccatgaaggatcgcctggccgaaacggaacaacttcgtgaaggtaaggaaccggtgaaggcggcgattcttgaaatcgaagacgacaatctcttcagaaactacggcgcgaaaaccgtgggcggcgaaatcgccgaaaaagccggcgcgaagctggttatggacgaagatcgcttcggctccgaagccctgctgaccaaagatcccgacgtgattttcgtcgtctacttcggcgaagacaaggttaaagataaggaattggatcgctttaaatccctgcccgcattaaaaggcctttccgccattaaaaacaatcgggtttatcccgtcagcttatcggaagtttacgcctccggcgtacgcaccgccgacggcatcgacaccatgattaagggcctctatcccgaatcatgaagcgctcggtgattttcgcggggcttacgcttttattcgtcgcgtcggtgatcggcgggctgtacctgggctatgcggatctaagtctcggggagattctccacgccttaagccgcggccttttcggcaagggcggcgacgacgtggcctatgccatcgtcatggacattcgcctgccccgggtgctcctcgccatcttaaccggcgtggctctcgccgtctccgggctcatcatgcaggcggtggtgggaaaccccatcgccgatccctacattctgggtatatcctccggggcatctttaggcgccaccttggccatcgtcctcggccttatgggcgccttgggcaatgtggccgttggtatcagcgcctttatcttcgccctcttaacctccgtgggcgtcatgattctttcccgcatcggcgggcgggccacctcggagcggctcattctctcgggcctggccctttccgccgccgcatccagcgtcgccacccttttggtctacacggcgaaaaaccgcgacgccattcgggaagtgaatttctggctcatgggctccttgtccggcgcgaagatgaatcaaatcgcctttatcgggccggtgatcctcgccctatgcatttttctcgccacccaaagccgcaatttaaatctgctgctcttaggcgatgaagtggcctacacactgggcaaggatctggccaagctccggagcgcctacattgtggcggtgtcccttctcgtgggcctcgtggtctacacctcgggcaccatcggcttcgtgggccttatcgtgccccacatggcccgctttctcttgggcaccaaccatcgccacctcatccccggcgtgattcttttgggggcgagcctcctcctttgggcggatgtggcggcgagaaacgccctgcccgccggggaactgcccaccggtgtcgtggtgtccgtggtgggggcgccctttttcgtctatttaatcgtgaaaaattctcgggaggtgcactcgtgatacgcgtggaacacctttccgtcgcctatggaaaaaagcaggtgcttcgggatttttccctcaccattcacgacaaggagctcgtggccttaatcgggcccaacggctccgggaagagcagtttcttaaaagccatggctcgtattttgccctacgaggggaagatttttctcgacgacatcgaagctcgggccatgagcagaaaagactacgccaagcggctggccgtcgtgggtcagtttaacgacatggccttcgacatgacggtcatggacatggtgcttatgggccgcacgccctacaagggtttgcttgaacgggacacggaggatgaccgcgccatggcaatggaggccctcgcctccgtgggcatggaaaactacgccatgcgctcccttcgcgccctctccggaggcgaaaggcagcgggccgtgctggcacgggcgctggtgcaggagaccgaccacctgcttctcgacgaagccaccaatcatttggacatttactaccagctgaagctgctcagtatggtgcaggatagaaaacacaccgtggtggcagctctacacgacatcaatctggctctggcctacggggaccgcatcgtggctttaaaagaagggaagctgctcttcgacgaagccccggaacatgtgaccccggccatgatcgaagccctttacaccacgccctgcaccttgcatgaggcccaaagccggccggtggtagtgtttaataagccctgatgaaaaagaacgcggagcaatccgcgtttttttgtgcggaaaatgagaaatcgcccctttctgtagccgtcgcccgttcatttacaaggcatggggcaagctatataatatgtctattatagaaaggtgtatgaaaggagacagcgttgagaaaacaagtagaagaattactttcccttatgcgggagagagatatagatttgtacatcgtgccctcggaagattttcaccaaagtgaatacgtgggcgaatactttaaggcacgggcctatgtgtccggctttacgggaagcgccggcaccttggtggctacggcggatgaggtgtgcctctggaccgacggccgctacttcctccaaggggaggcacaattaaagggcagcggcattcgccttatgaaaatgggcgagcctaaggtccccgcgattaaagaatatattgaagacaagctgccggtcggaggcaccctgggcttcgacggacgcaccatttccgtggccgacggcgccgattacgaggccatttgcgaaaaaaaatcctcctccattacctacaacatggatctcgtgggagaaatttggcccgatcgcccggccctttcgaacaagcccgcctttaaattagatgaatccattaccggggagagcgccgcatcgaagctttcccgtattcgggaagccatgaagcaaaaaggcgcagacacccacatcgtcgcctctttagacgacgtgtgctggacgctgaatctgcggggcgacgacattaaatactcgccgatccttctctgctacgggctgattaccatggatgagatggtgctttttatcgacgaaaacaaattgagcgatgaaatcaaggccgaattaaaggaattgaacgtgcgccttcggccctacaacagcatttacgacgacgtgaaggcattgtcgggaaagaccattcttttggatcccacgaagatgaactacgccctctacgaaagcattcccgcggacaacaccttggtggaaggggccaatccctccatccttatgaaggccatgaaaaaccccgtggaagtaaagaacatggccatcgcccacgtgaaagacggcatcgcctgggtgaagtttatgtattggctgaagcatgccatcggcaaggaagagatcaccgaaatcggcgcctcggataaactggaatccttccgcaaggaacaggaaggctatatgtggccctccttcgccccgatcagcggctacggcaaacacgccgccatcgtccactacgccgccacggaagagagcgacattcccctggagccaaagggactctacctttccgacacggggagcaatttcgccgaaggctccacggacattacccgcaccatcgccctcggcgaattaacggaagaagaagtgtaccacttcaccctggtcttaaagagccatttggccctggccatggcgaaattcccttacggcgcctgcggctactccctggactacgcggcgagaaagcccttctgggacgcccatctgaactttaatcacggcacgggccacggcatcggccagctcttaaacgtgcacgaaggcccggcgggcattcgccaccgggtaaatgtggcgaaaaacgagcaccatcaaatcgagtccggcatgattattaccgacgagcccggcctctacatcgccggcaaacacggcattcgcacggaaaactgcatggtggttaaagaagacggcgaaaacgaatacggcaaatggctctgcttcgagcccattaccctggttccctacgatttggacgccgtggatttctccctcttggatgaaaaagaaatcgcctacttgaacgcgtacaaccgccgggtttacgacaccatttccccccacttaaccgacgaggaggcccgatggctgaagaaatacacgagagcaatttaataagggacaaaaataccgccatgggcgggggcttttatttggcttccgccacactggccgtggagcgcttcgccttttacgccgtgaagtggcttatgaccattatggtggccgccgccgtggcgaaagggggcctgggcatgggaaaggccgatgcggcgaaagtcagcgccaatttagtggccatgacttacatcacgccccttatcggctccatcctctccgatcgctttatcggcgccaggtacttgattcccgtgggcatggcggttatgggagcggggtatcttctcggctacaaggccgactccattgccatgattaacgggatgatcctcgtggtgtctttgggaaacggcctctttaaatcccaaattcacgccgttaccggccggctttttaaagacgaaaagcttctggacaaagccttttccacccaatacgccatcgccaacatcggctcctttttaggcacggccatgatcggcgtcttggtcatgggcaggggctacgccttcggctttttggtctgcgccctggtcttgtttgcggcggcgcttatctttgtcctcgggggaaacttcctcggggacacgggaaagaagccctttaaatacgacgagaaaaaagaaaaagaagaaaagagcaaggcgcccctcgcccccgcggaaaagaagcgggtgggggccatcgtcctcgtctccttcttttccatcctgtttcgggtgttttggcacctggcctatttgcccgtgtacttccactgggcaggagagaatcccgccgccaattggatggtgggcagcttcaccattccctcctcctggtttgacgccctgaactccctgtgctgcattctcatggggccggctctcggcatgtactgggcgaagcgggcgcgtagcgaaaaaggcgacttcaacatgtttcagaaaaccgccttcggtttgctccttttaggcgcagcttacggaatcttcgccgtggccgacgtggcacgaggggaaaatcaagcgggccttctgtggatcgtggcctttggcattatcttgtctctcggtgaaatggtctttgcgccactgggcaatgcctttatttctaaatacgctccggcccgcctcctctccaccttaatgagcgtgtgggtcttcgccatctttatctccgcgaaaacctacggctacctctacgaatttaccttgcaatttccctttgcaaaaacctactttatcatcgccgccattataacctttggcggcctcctcctcttggcattcagtccgaagctgaaccgattggtggaggatgacaatcaattaaactgaaaggagccttttatgaatcaagaacggatccggcgaatcacagagggcatgaaagcccgcggcatggaccacctgcttatttccgatcccgtggccattttctacctcctcgggcgaaaaatcgtccccggcgagcgcatgctcgtcctctacctccacgcaaaaggcggggcgaagctcgtgatcaacgaactctttccccaagagggagacgtgggcgtggatttaatttggtacaacgatgtggacgacggcgtggcgattctcgccgaagccatggaagagggcgacaccgtcggcatcgacaagaattggcccagccacttccttttgcgccttcaggaaattttccccgagaagcgctacgtgaacggctcccttctcgtcgacgacgtgcgccgaattaaagacgaaaaagaacaagagattatgcgtgaatcctcaaaaatctgcgacgaagtcatggaagcgctcatcccctgggtggtaaagggccttacggagaaagagctggacgccaaagtgcgggagcttttcgccgagcgaggcgtgacggagatgtctttcgatcccattacggcttacggccggggcggcgccgatccccaccacgccaccgacgattcaaagggcaagcgaggcgactccgtggttttggacatcggcggcatgtataaaaactacgccagcgacatgacccgcacggtctttatcggcgaagcctccgacaaggcgagggaagtctacgaaatcgtgaaagaggccaatttgcggggcatcgccgccgccaagcccggtaaccgcatgtgcgacgtggataaagcctgccgcgactacattacatccaagggctacggcgactacttcacccaccgcaccggccattccatcggcctggaagatcacgaagtaggcgacgtgtcctcggccaacgacgccgtgattcagccggggcaagtcttttccgtggaaccggggatttatttgctcgatgaaggcatcggcgtgcgcatcgaagacttggtcctcatcaccgaagagggctgcgaagttttaaatcaagtgacaaaagatctcattgttgtagaggaggaagatgatggtcgcaattaaagaagggcgcatggcctttaaaggcttcgaaacctattaccgcatcacgaatcccgaggggaagaaggcgcccctcctcctccttcacggcgggccgggaagtacccacaattatttcgaaggcttcgacaagattgctgaggcgctggatcggcccattattatgtacgatcaaatcggttgcggcgaatccgccaccccgggccacaccgagctttacaacgccgaggtgtggatggacgagctggaggctataagagagcatctgggcctcgagaagattcacctcctcggccaatcctggggcgggatgcttgccatttcctacatgatggagcgggatcccaaaggcgtcctctccctgattctggcatccacccttcactccgccgccctgtggcgggaagagcagtggcggcgcatctaccgctttatgaccaaaaaagagcgggcgatatttaatcaggccgaagcgtcggacaaatacgacgatcccgattacctgaaggcactggaccgcttcatggcgctgtactgcggccccacagtgaatgaaaagagccccgagtatttgaagcgggaaaagaaaaacgccggggaagtgtataccaccgcctggggcgccaacgaattcggccccacgggcaccttggcccgctacgactaccgggggcaattgggaaaaatcaccgtgcccgccctggtgaccagcggccaaatggatctgtgcagcccctacatcgccaagagcatggccgacgaactgcccaatgcccgttgggaactcttccgcgactcgcggcacatggcctttattgaagaagagggacgctacttccgcctcatggcggattggctgaaagatttcgaataatacttacgcgaggcgccacccggtgcctcgtttttgtatcttcgcacccttcctgttataatgggcgcgaaagggggtgcgccgtgggagagatgatcgaattgcctcgggtgagggaattaaaagcgtccatcgacgatttaaggcaatccgtggcggaggccatttacacaaaagcataccttatccacgtcgtggggcgagaaattgaaatggcggatcgcctggcatcttacgatgtggaaattgacatcctcgaagcccgctgccgcattctcgtcctcgcccgggaaagagagaggcgcttggcgggacgtaccgtggcgggaaaaatcgccgaagcccaaatggacgaaatattgggccaatgggaaggggagctgagtcggaaaaagaccttgctggcggaagcccgggcatggaaagcccggcccgcggcgaaggaagaggcgctgcgggggctgatgatggtgctcataaaggccctgcatcccgatctgaatcccgcagccggtgacgaggggcttatggaaaaagccgcggatgcctttcgagcaggcgatgaaaaagccctgaggaaacttgcagatgaagcggaaagagacgagggagactcgcttcccggaagccttttggaagaagaagcccgactgaaaaatctgcgggatcggtatgcagatgggatcaccgccataagaaaggggccgccttttgcgggagtccttgatgccgaggggcgagaagcccgcaggaaagacttaatgaaagagcgagggcgcctggaaaaagtgagagaaaaagaagaagccgccttcaaagctctcttcggcaatacaaaaccgaaagagaaaaaagaagacgatgggtagatggaaacgtcgctaacagcggcgttttttcgtgggaagaaattcttcatcacaagggcgctcttctgtcgcggctttcgcaaaaaaagcacccgtcatcgggtgctttccttttgctctaaaggctttaattgattttttggaagatggagatggagcggtcggaatgttcgtaatacacttccatgcccatgttttccacgataaagcgcaggggcacgagggtgcggtcatctcgaatcgtggcacccacatccagggcgacggtgttgccgtctatggtggcttcgtttttgtccgcaggtaggccgatggtgtggcccttgtagtttacgatggccgtgcggttttcattgtcccagctcacttcggcgccgtaggattccattaagaagcgcaggggcacgagggtgcggtctttttgaatcactggcgtcgtgtccatggtgcggttttcaccggcgaaggtaaagtttttcttgcccacggtcatgcgcactttcgcgtatcccggagattctttcacatagctcgccgtgttggggccgaagtttgccttgtagagcacataggcgccttccgctttttcctggcggaagatggcgacgggttctttcacgccgccgccgggcattttccagctgctcgtatccgcttttgccgcgcctctttccacggtccaggcgatttgggcgggatcgaggacgacgcttcggccggctttggtgacgcctttcggtgccagggtaatggtgttgccgttatctttggcggcgagggtgaagctttttaatgcgccggggctttgaatgtccacgggcagggtgatgttgacgccgcctgtggtggttaagacgatgttggtcttgcccaccttcggcgagaggaagcggctgtagatccaggcgcctttgccgaaggtgctgtccgttaagctgtagcccacgttttcaacatgaatggggtggtagttgctgtcccaggctttgcccagcttgtaggtggctacttcgcccagaaccaagtggcgagggcctgcaatttcgccggctgaaagggcggttttcggcgctttgttcatgacgccgatgccgttgacgatgcgccgctcggcgccgtttctctcggggcgggcgatttttgtgtttttgaaatccccgtggcctcgggccaccatggtggtggagccgccgccgtctaagttaatggctttttctacgcctaaagcagcgacggtggctgcccattcatcgagcttcatgccgcggcttttgctcgtgcggccttccgtggccacgaggtagacggtttttcggtcttttgaaatggccgcggcgcttctggcccggtagccgtcgatggaagcggcgtccatgaggtagggttggggccggccgccgtttactaagagggcgtggccgccgattaaaaagcgccagtttctgtccgggctcacgcggtaatccaagcggagtttttgcccgggcttcacgtggtttcgaatgaagtctttggctcgtccgttgacctgcaaaatgtatttacccttgggggtgaccatgggaatgggcttatctaatgagatgcgctccacgacgaaattgccattgaccaagacttcgccgctgcctctcaggccgcgggagggggcggtccaaaagtcgttgtacaattggatgctgtctttgtgggaggggacttgggtgtggttaatgatgtagtcggttttgtttaagccgctgattttgtaatgggcgccgtcttgggcggtggcgcggccgttgaaggtaaagctttcgatgtaggcgtttttcccgctgtcgatgccgaaggcgaaaaggcccacggattccagaggcgaagactgaagcttgccgccgacgacggaggggccgaagggggcgccttgcttggacatatggaagaagtcgccgttaatgccggcgtaggcgtcggtgcgatcggccatgcggctcaccgtgtctttgcgggtgtagttgcccgccccggccatgacctcgagatccgccccgggattattcagatccacctggatcacatcgacgatgtggtttctgccgccgatggttgcggaaagctcgcggcgcacgacgccgggggagacggtggtgcgtccgttttctcttaaggagacggcccgtgccccttggggaatgagaaggatcagggccaaagtacataaaaataaaatttgccttttaactcggttcaaataaaacacctctttctttcttccattgtactggaaaagggattttctgtgggtgttaatcccgttacaaatcacctgcaaggttgcggccgtcgatttttctgtaaaactgattgtctgccggatccagcggcggcagatcgtagcccatgcgctgcatttcgttgagcttaaagatcataaggttcacgtccacggaaaaggcccgggccatgtccatgtaggagtagcccgcccgggccatggcataaaccgcctcgtcttctaagaggaagtgggcggagaagatattggcctcaagctccatggcgtcggttaagtgaaagagggtgtactcgatgagctcctccttctcggcgtggtggcggtggtacaggtggtggcccagctcgtgggccaggaccatgcgctgaatcggcgccggcacccggtcgttgtaaaagacgaagggcttattcagcaccattttgtacatgcccaaaagctttgtggaagtggccatggtcacgaggcccacgcccaaagcctccagcgccgccttgggatcggtcccgtagcgtgcccgcaggccattggcatcgtcgtaaaggtggcggtagcgattatgcgtcttcgtcatgggaggatcccgccttttgggcttcgctttccagcttcgcgcggaaataagcttcctgtatggcctcaaacaccgcctgcttgtcctcgtcgtccagcttgccgccggcgaaaaggccgataaccccgtccaccaattcccgggcgtctttggcgccgctttctccccagcgggcctcggccgctaagataaaggcgtcttcttccgtgaagaaatgggccttgggcacgtgaaaaagcgcagccagggcgtcgtaggtggcgtcgtggcgggggcgcaggccgccggtttcgtaattggatatggtgcgcaacgaaaggcccagggcctcggccaaatccttttgcgtcatgccttgcgctttgcgcagagttttaattttttctccgaatgtcataggtcacctcgaaatagataaacgcaattaaattgcgtgtttgcgaaaaagcaccttgaaatatgcaatacagtttcgtattatggaaataaataggaaatcgaattgcgtaaatcatagaatgaattgcgccttttgtcaagaaaggatcgccatgaaacgggttattttacattcggacatgaacaattgctatgcctccattgaaattcagagaaaccctgcccttcggggcaagcccctggtggtgggcggctctgtggaagatcgccacggcatcgtgctggccaagtccgtggaggcgaaggctttgggcatcaaaaccggcgaggccctgtggcaggcgaaaaacaaatgcccgaacctcatcgtggtggcgcctcactacgaagtgtatttggatttttccagaagggcccgggccatttactacgactacaccaatcaggtggagcccttcggcctcgacgagtgctggctggatgtgacggggagtgtgcatctcttcggtacaggggaagccatggcccacgccattcgccggcgcatgaaaaaagaattgggcattacggtctccgtaggcgtgagctttacaaagaccttcgcgaagctgggaagcgacatgaaaaagcccgacgccgtcacggtcatcggcgaggcggacgtggcgcggaaggtctatccccttcccgccgacgccatgatcggcatcggccgcaagacgaaggagaagctgcgggccgtggggatccacaccttgggggatttggccgcggcggacgtggcccttttgaaaagtcgcctggggatcaacggcgagaagctttggaagaaggcccgaggcatggaggaggatccggtgcgggatcgggacgaccttctccccgtaaaaagcgtgggcaacggcatcacccttcgggaagatttaaaaagccccgtggaggtgcggcggatctttcagattctcgccctgaatgtggcgcgcaggctcagggaaggggagcttatggcccgaggcgtcgaaattcatttgcgggataaagatttaagaagcatgacctttcagcgcatgcttcccaccgacggcgcctcttctttcttgctgagagacagcgccttcgatctttattgggagaaggtggatcccaaacgttccattcgcgccgtcaccctcagggccacgaatctcgtgccgaggaaggcggcggtgcaattagattttttctcaaatagcgaaaaaaagaaaaaagaagaggatttagaccgggccatttacacaattcgtcgccgttacggggaggatgccataacttttttagggctcctgaacgatacgaaaatgcccattcatacccatgatgtcatcaccttgccccatcccgtctttcgataagcgtttaaaaactcctgaaaacagggtaaatagattgaataggacatgaagatccgataaaataaggagatagacaggaagaggaggtggtgtccgtgaaaaagtcgccttacaccggcttggctttaattacacaggtggggctgaatgtccttctgcctatattaggctgtatgctcgcaggtgcgtggctggacaaaaaaacggggggaagcggattgtttcttctgcttttcacccttctgggcatcgccgccggcgtcatgaacattcttcgcttaggcaagaagctatgaaagatcgtttcaccaacgaatacatcgccctcactgcggggttttccctcgtggtatcgggggtgcttcttatggccttgaaagatccgaagcccgctgttttgggctggatcttcggctcgctgattgccatggctatgtttaagctcatgtactttaccttgctccgcgccgtggacaaacccgaggcgcaggcgtcgcgctatgcaggtatgcactacctgtttcgcttcgccctttacgccgcggtactggtggtggcggccaaggcggagtatttgagccttgtggggacgtttttcggtctattatccgtcaagtacgtgatacttttcagaaacatgttcgactatcttcgcagtaagaaaggagggggcttttgaaacgaggcatcgtctttcacgcaggtgataagaccatatggctccacgaatccttgttcacgaccttcgtcatcgtgctcgtgctcgggattctcagcttatatattcactcgaaaataaaaaaagccgacttcaaggaaaaacccacgggatttctgcacatcgtcgagattctcgtcgaggcggtcaacagtctgaccgtgcagaccatgggcgagcacaacaagggatttgccccctacatgctctccttgggcgcgttcttagtgtgcgccaatctgtccgggcttttgggctttgtaccgccgacgagcgactacaatgtcaccttggcactcgctttaattacctttgccatgatccacttcttctccgtaaagaccaaggggatcggaggctacttaaagcaatacaccgagcccatcgccattttaacgcccattaatattttaggggagttggctaatcccatctcactcagtttccgtttgttcggtaacatattaagcggcatgttaattatgagtctggtctatcagggaatagggttgatctcaaaatttattattcccctcgtcgcgtggcccttacacggctatttcgacgtattcagcggcatgttgcaaaccttcatcttcctcatgctgtccatgacttacattaactcggacatggcgtccccggaagaaatcgcagagagaaaagcaaaaaagcagtcgtaaccatataaaaagtgtagggaggaaaacactatgcaaatcaccagtgaagcgttcatcttaggttgctcggccatcggcgccggtttagcagttattgcaggtatcggccccggtgtcggtcaagggtatgcggcaggtcaagcggcagccgccgtcggacgtcaaccggaagcgaaagcggacatcgtacaaaccatgcttctcggtcaagccgttgcggaaaccacgggtatctacggcctggtcatcgccatcatcttattattcgtcaaacccttattaggctgattaaaggcgcagagaaccgaaaggagttgtccctatggaaatttttgtcgtgccggacatatggaatgtgttggcacaatggggcgccacacttatcctgtttctcgtcattcgccactttgtctatgagccgatgaacgaatttctgacaaaaaggcaaaacagcgtcgtctccgaaatcgaagaggcggaggaactgttgcgtgaagcggaagatcttcgcgccaaatacaaggataaattacaacaggcccgcaaagagggggcggaaatcatcgaagcctccagagaacggggccgcgacttggaaaaatccgccgaggaagaagccaaggcccatgcggcaaagatcatcgataaagcggaaaaagacatcgccctggaaaaggcccaagccttaaaagacgtgcgcgatgaaaccgccgacctcgccgtgatgatcgcggaaaaactgttaaaagacaatatcaacgaaaaaaatcaagacgcattggtagacggcctgatcgaagacttggagaagaaccatgtatgacgaaggcctgagcaaatacagcatcgctctctatgaggtgcaggaagcatccggcgaggatatgttggataagctggacgatgtgcgggaggtatacaaagacgaaaccttcctcatggccctgtcccatccgaaaattcgcccggaacaaaaacacgcgttaattaaaaaagtgtttggcgacacattgcccgagcccttgtttaatttgctctacgtcgtggccgatcacggccgctcgaatcgcttggtacgcattttagatgcttacgaagatttgtgctacgaagccaaaaacatcgagcggatcgtcgtcgtcgcgcccatgtccctgtccgatgaaaaagcggaagccattcgcaaagcctacggcaaaaaccgcccgggccaagtggaagtgaaggttaaaatcgatccgagcctaatcggcggtgtgaaaatcatcaccgaagacggcgtcatcgaccgcagcgtctcgaggcagcttgaggatttagggcgcagcttgagaaagaacccatagagaggtgagacatgaatctaagatcaaaagagatcggcgccgtcatacgggagcagatcaaaaattataatgtagacttggtcatggaagatgtgggcaccgtcatcgaagtcggcgacggcatcgcccgcatttggggcctggaaaacgccaaggccggcgagcttatcgaatttcccggcggcatttacggcatggtccaaaacctggaagcaaacaatgtgggcgtcgttttattaggcgacggcgacattaaagaaggggacgaagttaaggccacgggtaaagtcgtgcaagtgcccgtcggcgaaggccttctgggccgggtggtcaacgccctgggcgcacccatcgacggcaaaggcgactacccctacgaaaaaaccatgcccatcgaaaaaatcgcccccggggtcattaccaggcaatccgtcaccgagcccctgcaaacgggcaccaaggccatcgacgccctgttccccatcggccgcggccaacgggagctgattatcggcgacaggcaaacgggcaaaaccgccattgccatcgacgccatcattaaccaaaaagacaccgatgtgatttgcatctacgtggccatcggtcaaaagacctccaccgtggcacaaatcgtcgacacattggaacaacacggcgccatggatcacaccatcgtcgtggcggccacggcggcggaactttcgccgattcaatacatcgccccctacgccggagtcaccatggcggaagaatttatggcacagggaaaagacgtgctcatcgtctacgacgacctgtcgaaacacgccgtcgcctaccggaccatgagtcttcttttacgtcgtccgccgggacgggaagcattccccggcgacgtcttctacctccactccagattactggagcgggcggcccgcatgagcgacgcttgcggcggcggatccattacggctctgcccattatcgaaacccaagcaggcgacatttccgcctacattccaaccaatgtcatttccattaccgacggccaaatcttcctggaaacggacctgttcttcgcagggcagagaccggccattaacacgggcctttccgtctcccgggtcgggggcgccgcccaaacgaaggccattaaaaatgtgtcttccaccatgaaattggatctggcccaatacagagacctggcatccttcgcccaattcggcagtgaactggacaaggaaacccaacggacattggctcaaggggaacggatgatgcgcattttgcgtcaaccccaataccgccccatgaagctggagcatcaagtcttgatcctctacgccgtcaccaagggctacctcttggatgtggaagtggacgatgtgttgaatttcgaagaagagtacctgctctatgtggaaaatcaccatcccgaactcatcaaagacttgcgtgagcaaaagaccatgaccgatgccatcgaagacgccataaaagcaagcctcgtcgagtttaaacagacgcgataggaggtttttatggcatctacgagagaaattaaacggcgcattcggggcatcaacagtattttacaaattaccaaggccatggagatggtctccacggccaagcttcgtcgcgcccgcattcgacttgccaaaaccagaccttacttccaaaccgtcgtcgacgacattcaaggcattttggccattgtaggtgatgatcatccccttctggcgaagcgggaaaaagaaaccatcctctacatcgtgcttacctcggacaaggggctggcaggcggctacaatgccaatgtgctgcggcttaccgaaagcgccataaaagacgacggctgtcgatcgaagctattggtggtgggcaacaaggccaaggattatttcgaacgtcgcaactacgacatcgtgaaatcctacaccggcctcagtgaagacccaagctattcccacgcccgagacttggctgccgtagccatggagctttacgaaaataaagaagtggacgccattcgaatcgtctacacgaaatttatttccaccatcagctacaaagccggcgtctcctccgttttgccctccgaggatttaaaagcgaaggacgatgcgcccgcccctcggacgcaaatcgaattcgagccctcgccccaatcggtgctggattacctgatccccatgtatgtggagacggcgatcttcggcgccctcatcgaagcggcggcttcggaacaaggatcccgacgggtatccatggaaaatgcgtcggacaatgcccacgacatgatcgacgaactgcaaaccaattacaaccgagccagacaagcggcgattaccaatgaaatcaccgaaatcgtctcggctgcggatgctgtgcaataggaagaggtatcggtatgcatgagaatataggaacgatctgccaggtcatcgggcctgttgtagacatccaattcgagcaggatcacctgcccgatctgttaaacgccattaaaattcaaaacgacgaggaagtccttaccgtggaagtggcccaacacatcggcgacgacgtggtgcgttgcatcgcactgggcgccaccgacggcctgaagcgggggatggacgcgaaagataccggcgcggcgatttccgtgcccgtaggcaaggaaaccctgggccgcatgttcaatgtattgggcgagcccatcgacggcaaagacgccttaaagggcgatgaaaccatgcccattcacagaaaggcccccaccttcgaagatcaggacacgtccaatgaagtgtacgaaacggggatcaaggtcatcgaccttctttgcccctacgccaagggcggcaaggtcggcctcttcggcggggccggcgtcggcaaaaccgtgttgattcaagagctgattcacaacatcgctcaggaacacggggggatatccgtctttaccggcgtcggcgagcgtacccgcgaagggaacgacttgtactacgaaatgatcgactccggggttatcgacaaaaccgccctggtcttcggtcaaatgaacgaaccgccgggaagccggatgcgcgtcgccttaacgggtcttaccatggcggaatacttccgcgacgaagccggccaagacgtgctgctctttatcgacaacatctaccgctttacccaagcggggagtgaagtctccgccctgttaggccgcatgccctcggcggtaggctatcagcccaccctggccacggaaatgggcgcccttcaagagcggatcacttccacgaaaaaaggctccatcacctcggtacaagccgtctacgttcccgccgacgacttaaccgacccggcgcctgccaccacctttaaccacttggatgccaccaccgttctttcgagaaacatcgccggcatgggcctctaccccgccgtggatcccttggactccaccagccgcattctcgatcccaatgtggtcggcgaagaacactacgccgtggcccgtcaggtacaggaagtgcttcaagagtacaaagacctgcaagacattatcgccgttttgggcttggaagaattgtccgaagaccaacggatcaccgtggcccgggcgcggaaagtgcaacggttcctgtcccaaccctttagcgtcgccagccaattcaccggcatcgacggcaagtatgtgcccatcgaagaaacggtgcggggatttaaggaaatcttagaaggcaaacacgacgacgtgcccgaatccgccttcctctttgtcggaggcatcgacgaagttttagaaaaagccgcggcagccgaaaaagaagcacaagccgccccggttcaggccgaaggggaagaagcgaaagaaggggatgaacaatgatcgacctgcgcctggtgaccccccacgccgacggctttgaaaagcaggtggacaaagtcatcgttcgcgggatcttaggcgatatgatgctcatggaaaatacggcgcctatcgtcacgcccctggcctacaacaccatgaaggtttatatggacggcggcgtaaaaatcggcgtcgtgcacggcggttacgtgtccatgaaagacaatgtggtcaccattgccaccactgccttcgagtggacctacgacatcgacgccacccgggcgcaaaaggccaaagaccgtgccgaggcatggattcaagaagcccgcaccaagggggaagatgtgaatcgccaaagctataaagaagccaagctttccctgttgagagccattaaccgcttaaacaatgcggaaaactaatttgagccgccggagtcatccggcggttatttttatggaataagacccggacaatcggccgaaaacgtagaaaagtcaatgaagtcttttaatcttcctcgcttcagggcttctagtatgccttttcaaggcgtgttataataaatgcacaaagacgccgataccgtgcggaatttagagaagaggacaagatgaaagatttcgcggattttaccaatcacttcagaataaaaaattctctgcccggggtgttgaccaccctatttctttacggctttttatttttcatacagtttgccgtcatttatgccgtggggcattttttaaaagagcacgaagacctgcttcaatgggtctttttcgtcgtggatttaggggtggggctgcacatcgtcaacgaccgacggaacgacccggtgtacaaagtggcctttctctttaccatgatcgtcctgcccctgttcggcgcctttctctatattttgagcaagtgggacattatgcgccgctggttttccgaaaaattcgaaacatcgaagaagaaaaactttacttactaccaccaagatcccgaaatcatggaagagacacgtcaggcggatcccctcttttacaacacggcccgctttttgtggaatcaggaggatttccccatttatcgcaacggggcatgcgattattaccctctgggcgaagactactggcaccgcatgctggaagaattggagaaggcggaaaaatttatcttcatggaatacttcatcgtccaacaaggggacatgtgggacagcatcttagacattttaaaacgcaaagcggaagcgggcgtggaagtgcgccttatgtacgacggcacggcggtacttacgaagctgcccattaactatccccaggccatggaaaaattgggcattaagaccagggtctttaagcccatcgtgccggtgttgagtctgtaccaaaaccaccgggaccaccgaaaaattttggtcatcgataacaaggtggcctttaccggcgggatcaatttagccgacgaatacgttaacctcacggcccccttcggccggtggaaggacaccggggtcacgatctacggcgcggcggtgcgctccttcaccaatatgtttttgtccatgtgggatgtaaacgccgacgatccggaaagcttccggccctacattatgcctccggaagaagaatacaaaggcaagaagacgggctatgtgattccctttggcgacgacccctacggcaagaaccgagtgggaaaagaagtctacaacgacatggtgaatcaggcggtgaattatctgcacattatgacgccttatttgattctcgacgacgagaccaagagcgatttgattcacctggcccacacggggaccgatgtaaaaatcattacgccccacattcctgacaagaaaatcgtctttcgtgtaacccgcagctactacaaggagctgatccgaaacggcgtcgagatctacgaatacacgccgggctttatccacgccaagagcttcgtctccgacgatcggaaggccgtggtgggcaccattaactgcgactaccgctccctgtttctccacttcgaatgcggcgcctacttttacgatcaggctatggcccgaaaggtggaggcggactttcaggaaaccctcaaggaatgcacgccctttaccatggatatgtgtatggaattcaattacttccaacgagccgccggccgcgtgctccgcatcttcgcccccattatgtaggaggtagctatgaaattgcttcacttgatcgctcaggagcttaaacaggggaaggaggcctttcgccgcttccccctgtccatggcctttgcttttttggcggcgatctttcaatgtttgtggcttcataagggcgatgcaacggcctttaaaacctcgccctatcttctggctgccctctgtgtcatcggctttttccttaccacggcggcctatttgtacttagaaaccgccagggatcgtgaaaacttccattcccttttgctgggcacctggatgggtgttttgctttttctcgtcataagcacctttcgcatggcgtccatgagaaaagaaggggtagacatctacttcgccatgcccaccttgattctcttcgccgcctccgggctcatggtcttttgcggcggaaagattcgcgacgaacgccgctttcccacctatgtcctcattattatcatggaaatcgccgtatcctatctctacgcctttgtcctctttgcggccatgtgccttttgctcgtgggggcggacgtcctcttcggcgtcgtcgatttctccacgacggttacctatctcgtcaccatttgctttatgccctttatggcggcaatttttctctctcgcctcagcgtcgtggaagaaggccgaagccattacggcgccgggatccacgtgatcaacaatttatttaacaatattcttgcgccggtcctgggcctttacgtcctgctcctttatttgtacatggcgaagattattattttgcaggagctgcccaccaccagcgtggtgaacctcattctttggcccatggccctcgccgtcttcgtgctctttatggtggaccacaatcgggaccgcaccgccgcctattacttccgcaaggcgatgccctcggcggccctgccccttttgggcctcatgtactacgcctggtttttgcgggtgcatcaatacggcctcacggaaaatcgctacatgattttcgccctgggtttgtgggtggcctttgccatggtccacttcatcgttcagaagcgggagctgcacatgattctccccatgaccttggcggcagtgcttttggtatccgtcttcggcgggcccatcagcgccgatagcgtggcctatcgctctcagaaaatgcggctggaccgcattctcgcggccaatcatatgttaaaaggcggggaagtggtgccttccggaaacctctccgtgaaagaaaagcgggagattcaggaaatcgtcgagtacctgacccgcaaccacgacgtgtcccacgtggcctatttgcgggatgccaattcctccgaggccatggagcggatctacggctttcttccggataacggcggcccggtgacagatctgaattactccatggatatggcgaagggcatggatatttccggctacgacaagatctacttcgtcgactcctatggggaaatggatccgacggtctcggaaggcctgaagacagagcgcatccgcggaagcgtcgtgattcatttaaacgacaccgaatcgatcagcgtggatttaaaagacgttcgcgaaaagatccgcatcttgcgcgaaacgaaagaagaaatcgagcccgaagacctgaccttggaaggggaaaaggaacgctccgcctacaagatctacattacgggcacggtatttttctccgcccaagggaaagtggatcccgatgcggggatttccctgtgcgtcctgctcaaggagaaggaaggaaagtaagtttcagaataggggaagggaagcattgttttgcgtgaatttatcgaagcctttgtcatggtgtttatcggcgaaatgggggacaagtcgcaatttttagccctggccttcgccaccacctaccccacgaagacggtgctcggcggcgtcggcttggggatcggattaaaccacggcctggccattttggccgccgtcttcatcgccggttttgtcggcgacatggtctttttgcaactcgtcgccggctttttgtttttattcttcggcctgtccgcccttaaaacggaggaggcggaggaagaggagaaggcaaaggccaccaccatggggcctctccttaccgtggcatcggcctttttcgtcggcgaattaggcgacaagacccagcttatggccatgaccttggccatgaacagccctcgtccggcggtgatttttctcgccaccgtctcctccatgatcctcgtgtcccttttcggcatcctcgtgggaaaatacctgggcaagaaaattccccacagggcgctgagctatctggcggcctttctctttctcctcttcggcaccatgaaactttacggcgccgtaaacgacggctttaaaacgcccatttggataggcatctacgccgccgcgctggcggggctcattatttacaccttgattcaaaacaaaagggcgagaacagggcgaaaagaacggaaataaaaggttctatgtcaaccattggggagtctagtaaaaactaggctcctttttgttttcctacacaccctcactcacttatcttttgaacaaacaaaaagcagtttcgtgcggaaatgatgaaagttacgcattccaaaggccacgcgcttcaccgtcttgatcttgttgtgcgttccttccacgtagccgttactccacgggtaatcaaagatgttggtgatctcctcgaaccagttgttgtaggcgcgcaagcagtaacgccattccttttgcccgcctttctttgcctcttccatccactttgaaagggcggtggcggcggtttctttgtcgttctg

SEQ ID NO: 43 - DNA, 34868 bp, Peptoniphilus rachelemmaiella
  source 1..34868: mol_type = genomic DNA
ttgcaatcaatggtaatcaggcgtctttcttctgaaacaccggtgacctcgacatcttggattcctaaaagtaatgtggtaatattgttttgcacttgtttgcccccctttattattttgtggtgatttaattttaggtgattaggaaaacaagtgctatctttttgcacaaaaatatccattaaggaggttactccccaatggatattatagagccttattttataggtagcaccgtcaggggccccttttaatcttagataaacaaatccgtaaattcctttgtaaccaaaatcaactctatcctttgatttgcagaattcagctttctcaatttcaatgccatgatctttcattccttctgctgttacggatgactttaaactggcagcatggaccttagtactactcattaaagtagaaattgtcaaacaagccacggttaggcaaaagataagtaaaagtcccttgctttttatctttaaattttgcaggtacatttgattctcccttctatctcaatatcttttaaacttaagatactacaagttaatacagctaaatcataatatctaccttgttcgaattgaattaagcattgcactttcacctctctttttgatattgatacttattatctgttagttattataggcttcactttcctttttgtcaaatcaacgtattgtcgaattatttaaaaatttcagctctattagcgatacaattgtcgacggtcatagaactcttttttagatccaattttgaactcattgattgtaatatcaagttgaatattcaataaagtccatatggctttctttttaaagatttaagtataaagaagtacattcattagaaggaaagtcctatggacaatttactgcaataaaatacaaaaagggcaattccttacatttgaatgccgagttttatccaaactcgcctaaaggatgacctgaaagctaacaaagtagcaaaaaacgtttgtgctcttaatactatccgcaattgaatcaaatatgaaacagtgacgctttgtagtactaatgttctaccctacaaaaccgctaacgtgcaagctaaccatgagaaataacgccaaataagttgtagctacttcgatttcctcaaaatgttcgattctatttcttttgtagaagagaatttcttcgcaaataattagacgctgggtgcatgcgtcggctacactataaatggcgttctttttactagagaacagatcgttagtatcaagacattctatcgctcttttatgctgggcttacttgctttccacaacattgaccttccagagaaactacttcagtctctaaagaaaaaggggatcgtataaacgaccttcggaaacaaacaatcataccgagtttaggcacacgggtgtagaacttgttatcggttctataaaatgatgacggtagctttattgctataattgaacgtaacaccagcgagtattggatactcctaatcccaggacgggatacaagcagtatcatggctaccttagggactattcgctaacaatacagtgaacaataagatgatgtcttcaaaaaggtgacgtcaggtaatgaacctaagttttcgatgttttctgatctggagaagatcagaaaacatcgacttacttcgctgctcctatgcctcttgtggaaagtgatctatagagcgacatacattaatctaattcgcagattttcctaaagggggccgtcttaagagttaatctgataaacaaattccctacatagggatataatgtaataatctgtcgaaaaacacttcttgtctacctcactccaactgaactatttggaggtgagttaaatcgaatttactcctgtgctatttaattgattaatttactgtcgatgttcgaatgattattgtaattgagttcaaatataaaaggctctaataaatctattgaggagtagtgccctcaatgaatattttcgcacaataaacatcccccagcgtagccgggggttttctttgtcggcccaaagggcttgtattactagctgcgcctgaagggcgtcgttggtctgcccgtgctaacattactcggctaccccttaaaggggttcgtcgtgtcaaaggttagttgctcacttatttgatcctctttcaactggttttgtatatactcttgaatctttttagcgtttttccccgctgtatcaacgtaatagcctcggcaccaaaactgccttcccctatatttgtatttcatgtctccccatcgttcatagatcatgatgctgctcttaccttttagaaagcccatgaatgaagatacagatagtttgggtgggatctctagtagcatgtgaacgtgatccggacatacttccgcctcgattatgttcacgcctttccaactgcataactcccgtagaatcgctccaatttctaagcgcttcgatccataaaatacttttcgcctgtatttcggagcaaacacgacgtgatacttacaattccaatttgtgtgtgataaactatgggtgtgatttagtgatgtcattatttcctcctgattgtgattggttggcagacctctctcatcatatcacgctggaaataacgggcaattatcgctagagccaaacggaacccccggtctaaccgggggttttctaatacaaaaaaacaacccgccgaagcgagttgcttataatttgatcgagtggaatcgactacataaagatgccgccgaattgtacaaagagcggtgcgaagaccaaggaaacgatggtgatcagtttgattaagatgttcaaactcggtccggacgtatccttgaaggggtcgccgacggtatcgccggtaacggccgctttgtgtgcatcagagcctttgccgccgtgggcgccgccttcgatgtgtttcttggcattgtcccaagcgccgccggcattactcataaagatagccattaagacgccggtaaccagtgcgccggcttgcagaccacctaatgcttccgtgcctaagcagaagccgacaactaagggcacgatcacggcgatgatgccgggaacgatcatttctcttaatgcggcggtggtggaaatgtctacgcattttgcgtattccggagtcgcttttccttccatgatgccggggatgtctttaaattgacgacgtacttcttcgatcatggccgtggccgcattgccgactgcgctcatggttaaagcggagaaagcgaagggcagcatgccgccgatgaaggtccctgcgataacgccgggcttggaaatatcgatgcctgcaaggcccgtagcttgaatgtaggatacaaacaaggaaagggcggtgagggctgcagaaccgatggcgaagcccttgccgatggcagccgtggtgttaccgacggcgtctaaggagtcggtaatgccgcggacttcttcggggagttcgcacatttcggcgatcccgccggcgttgtcggcgatggggccgtaggcgtctacagcgatggtggatgcggtggtagccaacatacctactgcggccaaagcaatgctataaaggccgaagaccgggttttcgtggccgccgcctaaagcgtatgcggcgataatgccgatagccaatacgatgatcgggccgacggtggacatcatgccaacggagaggccggcgatgatgtttgtggatgcgccggtttccgattcgtgtgcgattcgttgaacaggcttatagtcgtcggcggtgtagtattcggtgatcttggaaataaccaagccgacgcaaacgccgatgatgacgggccagaacaaggtgagttcgccgaaaatcatgtttgcgcaaataccggagacgataatggtgacgccggatgcaatataggtgcccatgttcaatgctttttgcgggttcttgtcccctttaacgaagaacatggaaataatcgaagcaataataccgatgacggcgatggaaaggccgtattgaatccctttgtcttgggaagccaggaaacctaaggtaataacggaaaggagtgcgccgacataagattcgaacaagtcggcacccatacctgccacgtcgccgacattgtcgccgacgttatcggcgataacagccgggtttctcgggtcgtcttccggaatacctgcttcaactttaccgaccaagtcggcgccgacgtctgcagctttggtatagataccgccgccgacacgggcgaagagggcgatagaggatgcccctaaggagaagccggtgatgatttcagcatcgccgaaccacaggtagaagacggaaatccctaaaatacctaaaccgacgacgacaagacccataacggcaccgccggagaaggcgatatccagagccgctgccatgccgcttttgtgggcggcattggcggtacgaacattggctttggtggccgtgttcatgccgatgtagccggcggtaacggaaaagatggcgccgacgatgaagcatacagcggtgcgccagccgatagcgaatgttaaaacggcggccaatacgacgacaaagacgacgagcgctttgtattcacgttgtaaaaaggccatggctccttcgtggatatagccggagatttctttcatccgatcgttacccggatcttgctttcctacgtaggaagatttcataagaccgaataaaatagctataataccgacgatgggagcgatgaataaaatattaatatccatgattcctcctgattattgcataactgctacaagcaaaatagtagcgataaaaaagattgtcgaagagaccatggtaatgcgcttgagcatttccttgcgactggtcccacgattggtcccccattccgacgacggcgagctaccgtctaaggtacccaagcccacttgattggattcctgaacgacgatggcccaaatggtcgcgatggccgacagggcgacgataacactgataaatgtagtcatatttacacctcctcgatccaaactatctatcaataacattactatcctaacataatccattgtgtattgcaattggaagctgccgcaaaaaggcttgttttacgcattttactggttagttttaaagagaagggctataatcatcttaaaggagtgaagccattgaatcagacctatccctatccttcgaaacgcagtttgacctacggccgcgccatggcccttgcctccaatccctcggcggccgcggcgggcagaaagattttagaagccgggggcaatgccgtggacgcatccgtcgccatggccgccgcccaggtggtggcagagcccacctccaacgggctcgggagcgatcttttcgccatcgtcgccatggacgatgtactttacggttacaacggcagcggcaaaagccccgccgccatttccctcgccgccatgaaagaaaaaaaatgcgaggccatgccggagttcggcatcgaagccgcaggggttcccggcgccgtacgggcctgggcggacattcataaaaaacacggccgcctgccctttaaagacgtgctggctcccgccatagactacgctgaaaaaggcttcgtcctccccccccaccgtggcgcggctatgggccatggagctcgaaaaaagacgtgccaatcgaggtgctctttacgacggcttttgggcgcagttttcttttgaagaaaaggcgccgaaggcaggcgatgtaattacttttccggacatggcccgcacattaaaatccattgcagaagacggcggagaaagtttctacgaaggggccatcgccgaaaaaatcgacgcctttatgaaagcccacggcggctttatgagaaaagaagatctcgccgcacagaaaaccttggaggttgagcccctctccctttcctttgaaggggccgaggtgtgggagctgccccccaacggccagggcatttccgtcctcatggccctggagattttaaagcacaagcccacgatccccgacgacggcaaaagcgcccatgtcatcgccgaggccattaagcgggccatgaccgacgcggcgaaatacgtggccgatccagaatacatgtccctctcctcggaggatcttttaaatccccagtatcttaaaaaatgtcgcgacgcaatcggagaaaaggcggagatcgttcactacggcaatctcttggatcgctccacggtttatttctgtgcaggggataatgaaggcaacatggtctccatgattcaatccaattacgacggtttcggcgcgggcatcgtcgtgccggagacggggatttcactaaacaaccgcctcttgaacttcacattcgaagaaggccacgacaattgtttggccgggaacaaacggccctaccacacgattatcccgggctttttgacgaaaggcggcaagccctacggcgccttcggggttatgggcggctttatgcagcctcagggccacgtgcagactctccttcagctcttgcgctacggcagaaatccccaggcggctctggacgcgccccgctttatgtggacgggagataaagacctcgtcgtggaagaggattacaacgagaaggccgtggaggaattgatccgccgcggccaccgggtgattcgaccgccccacgatttggacatgggccggggccaatacatgctctacgaccggaagcgaaaaatttatgtcggcggtacggaaaagcgctgcgacggcaccatcgccgtggcggactcgtttatttacaaaccattccccggcaagtaaaatggtgatgagaggtgatatcatgagagaatggaaaacaagccttctgcttcttgccgtaatcttcctcgtcgcgatcatggtgaactatttcatttccatgaggatctatggtcattggcagttcagtgatgtttataaagatatctatttttggatctttatcggcgccacaatctttttcagagtcctcgtttccgcgatttctaactattgcaaaagaaacagtgcacataagaaggattgattttgcccaatcaaaaaccggagagcacgtctccggttctttttttaaacaattttaccaggtgcataggcccgtggcctcttggaacttccacaggggccgaatgaagaagcgttcgtctttgtacgcctcaaagggcaaggtgtactccccgccctcgttggtccaaatgcggcggaagtaattctccacagccatgtgcatgggggaattgcattccatttccacggccacgtccgtttccaaattgtagttatccaaatttctgcgggtgaaattgccgctccctaaaatcgcgagaggcttttcatccttgaaatcgaagtaaatcattttcgtgtggtattgctcgccatgggtgttgtaccagcggatctgaatgctcggtgccttttccttcagctcgctcaatgccggccgattgggggcgccgtttttctcaagcccaaaggcgtctttgtttaagtcggcgacgatttttacatcgacaccgcgattggccgccgcctccaaatccttcagcaggcgaaattccgacaggtagaagatgccgatatgaatcttatcgcccttcttgctcttgttaatattctcggatatggcgtcgtagatcgccccttcggtgatgaccttcagccgatccggcgacgcaacctcttcggccttgtaatcctttaccacaggaggcagttccttataaaagatgctttccgagcgaatcaaatcctctatggccttcccgcgaaagacgacggccacattggaatggtaagcgctgggatcgtggggattggcggaagccaccatggcttctttttcggaaatcaccacttttcggtgattgcccttgaaattcataagctttaatacggagcgcaccgtcaccttctccccttctttggcgaagaagtttctgatgcggcccttccccgccgtgccgaagaactgaatgtaggcgcggtagatgccggagaacagaggattggaatcccgcatgcgatttagatccgtgaccaccacctcgatgccggcctctttcagccgctttatattggcctcttcgtaggcgccgtagaagttattgatcggatccgtcacaaacaaaatgggcatggcgggattttcacgcttcttttcgattaaaagatccgtcatggccgccacctgtttcggacagtccacgtccttatcgtaagtggcattaaagaggaaaaaatccaccatgagaaatttttcggcctcctcgatcacttccatctctcgatcgaaaattttctgctcgtgcaccttctccccgtcttttacataactcaggtcgtaaataaattccgcctccgccggagaaaattcaccggagacattgcttccttcgggatttttcgtggtcaggctataagccgtgggaatcaaccataggagaagaagaatccacaggacgcgtttttttctcgataatcgcttcaataggcccctcctttttcatcattggaacaaaaatgcaccgtccctcggcgaaacattcccccggggtgggtgcattcatttatttgcagtggggatccatgggcggcaccgccgagaggagctttttcgtgtagtccgcttggggattgttcatgatgctgtcccggtcgttgatctccaccagtttgcctcggtacatgacgccgatgcgatcggcaatgtgttccaccacggcgatgtcgtgggaaataaagaggtagcttagatttcgctcctcttgaagctcttccagaagattaatgatctgggcctgaatggacacgtccagtgccgaggtgggctcatcggccaagattaaggtgggctccaccaccagggcacgggccacgccgatgcgctggcgctggccaccggaaaattcgtgggggtagcggccgaagtgggctttcgacaacccgcagaggctcaaggtttcacgggctttttcccgaatgttttcgccacctaaattccttaaaggctccatgacgatttcctcggcggtcatttgaggattcagggaactgtagggatcctgaaaaatcatctgcacgtcccggcgaatggccttcagctccttggcatcggccttcaatacgtccttgcctcggtagaggatttccccttcggcgtcgggatagaggcccaaaatgcagcgggccaaggtggatttgccgctgccgctttccccgacgatgcccacggtttctttttcgcctaaggtaaaggacacgtcgtccacggcggtaaacatctttcgctctttagagaacagggcttttttccccacgggaaatttctttactacgtgatttaatttcaacagatcagccacagcacgcctccccttcatagaggaaacaagcgacgcattggcccggccggtgttccctcaatcgcggcacttccctgccgcaaatgtccatgcgcttgtcgcagcgggaatagaatgggcaatgcccttccatctccgacggcggcggcacattgccgggaatgttgtagagtttttccccgcgattttccagtgtcggccgcgcccgcaaaagcccgatggtgtagggatggaggggccgatcgaaaatcgtgcacacgtcggatttttccatgaccctgcccccgtacatgaccacgacgtgatcggccatttgggccaccacgccgaggtcgtgggtaatgagcataatggccgtgcccatgtcccgctggaggctctccataagctccagcacttctttttgaatggtgacatccagggccgtagtgggctcatcggcgattaaaagctttggcgacgaggccagggccatggcaatcatgacccgctgccgctggccgccggaaagttcgtggggataggcgcgggctttgtttgccgcgtctttaatctctaccatctccagcatttccacggcttttttcttcgcttccgccttggaaaggcccatgatgcggcggtagacttcctcgatttgaaagccgattttcagcgccggattcaagctggtcatgggctcttgaaagatcatggccagatcccggctgcggagccttcgccgctcttctttttccatggataaaatgctttcgcctttgtagaggatgtccccctcttcgatttttccgtagggcttcggcaaaagccccatgagggacagggccgtcacgctttttccgctgccgctttcccctaccacggcggtggtggaaccttcttcgatggagaaggtgacgccgttgacggcgtgtaccgggccggaatcggtgaaaaaggtcgtatgcagattgttaaattctatgagtttcgacatattaacccctttgcgttgcatccagcgcgtctcgcaagccgtcgccgaaaagattcaaggaaaaaatcgtaagggcgatggcgagacccgggaaaatggtcatgtgcggatagtcttgaatgtagcttctgccttgagaaagcatgccgccccattccggcgtcggcggttgcacgcccaagccgataaagctcaagctcgccgcctgcagtatggaggtgccgacgcctaaggtagcctgaacgataatggggcccaagcagttgggcagaatgtggcggaagatcaggcggaagttggacgcgccgccgattttcgccgcctcaacgtattcctgctccttcacggaaaggacgcttgcgcgcacgatgcgcgcgtaattcgtaatccccgacagggacacggcgagaatcaaattgcgaatccccgtgcccaaaacggttgaaatggcgatggccaaaatcaaggatggaatggagaggataatatccacgaggcgcatgagcacattgtccacgccgccgccgaaaaagcccgccacggcgccgataatggtgccgaaaatgacggagagaatcgtggcgagaaagccgatgaaaagggaaatccgcgccccgtaaaccacattggaaaaaatatcccggccgaaattatccgtgccgaaaaaatgttggctcgagggggattggaagcgattggcgagattttgttcgtagggcacctgtgtggcgatgaggggcgcgaaaattgccacggcgatcatcaccgcaataatgacaaagcccatgaccgccattttatttttcttaaacaggcgaaggaggtcgtagaacctggattgttttgaaatcatagggcctccttattggtactggctgcgcacgcggggatccaagaagccgtagagaatgtccacgatcaaattgagcacgcagtaggaaagggaaatcaagagcaccgcccctaaaatcatggggtagtccatggcggaaatactttgcaccatgtggcgaccgatgcccggaatggagaagatggtttccgtcaagacactgccgccgattaaggaaccggtcaaaagtccggcgctggtgagcacgggaatcatggcgtttttcaaggcgtgaacgaagagaatgtagtgctctctgagccccttggagcgcgccgtgcgaatgtaatctctgctcagcacctccagcatggaggagcgggtttggcgcataatcacggccatggattgaaaaccgagagcgaagcccggcaaaattaagtgcttaaaagagcgtagccccgaggaaggcaaccaacctaatttcacggaaaacaggagaatgaagagcatccccgaccagaaaataggcatggacagaccgatcatgccgaaaaacatggagatcttgtcgacccaggaatacttgtacacggcgcttaagacgccgaacaaaatcccgaagatcacggccacggccaaagaaaagaccgtaagcttcaccgtggcggggaaatattccttcagcgtgtcccccacgtcggcgccggagaggtagctcttgcccaaatcgccgtgaagggcccctttcatgtagcgtccgtattgaacgataaagggatcgttcagacccagtttttcccgatacgcctcgatggcttccggcggcgcctgttgtcccaacttcgccaccgccgcatcgccgggggttaaatacaggaggccgaaaatgatgaagctcacgcccaacatggtgggcaccatgagtaggagtcgtcgaaggataaatttgctcatgctctcctctttccatacatttcatacatcttatgtaataaagactcccgagggagcctttatcgtcgtggtttattcaaacgtaatgtggtaaaactcgttgcttccgcagggatcgggctcaaagttcttaatgttcttttgtgcgccgataatttgctcgccgtaaagggcgaagatggccgggcgttctttaataaccagctcttgggcttctttgtaaaccgctgctcgttccttttcagatgccctgagacccttttcgattaaagcgtcaagttccggattgccgtagaacataaagttcgggcccacgccttttttcgccgtagcataggtggcgtaaaggggatagtggggatccacgatggaaggcgaccagctcataatgaacatatcgtgttcgtggtcgggcttgccgagggcggacatataggcgttccattccatggcgttgatttcaacattcaagccgacttcagccaattgcgattgaataatcgtggccatgtcctttctggcttgttggtcgtgaacgtaaagcttcaccgtatccccttccttgaccccggcttcttttaagagggccttggccttttcgatgtcccgcttttcgggcttaatggaatcggagatggagtagggaatgttcgggttcaccggtcccgtggcgactttgccgtggcccatgtaaaccgcatcgatgatggcttgcatatccaaagcgtaggtcatggcttctctggccttcgggtctttgaaaatgccccgatccacggtgaggccgataaagtgtacggagttgtccagcttcgtgtaaagagccagatctttgttctcttccaccttggatgcgtcgttgggcgccacttccatggcgatgtccgcctggccgctgtccaattcgatgacgcggttggcatcttccggaataatgcggaagaccattttcgtaaaggccggtttttcgccccagtaattttcattgtagctgagggcggtgttgtccagcttcttccagtcgtccaacttaaaggggccggtacctacgggattggttcccagagcttccggatctttttccgtggtggtcttatcgacaatcgatgccgccgggtgggccaaagccgccttaaaggtggcatccggtgcctttaatttaaatttaatgacgtgaggatccgaggtgtcgtagctgttgggatcgatttggccgaaaatgtagccgtaagcatccgattgagccacgcggtttaaggtgtaggccacgtcttcggaagtaaagtcttcgccgttggaaaacttcacgccttctttcaacttaatgacataagtgacgtcatcgggctgttcgatggattccgccaagcggttttccatggtgccgtcgggcttacgaaccaccaggggatcgtaaatttgtttaatgatgttttctgcgtaaatactgttttgaatggtggggtccatggactcggcatcggaggcttgggcgataaccaaggtgtccttgtcctttgccgcggatttacctccgccgccaccgccgccgcaggctgttagcagcatggccatagccagggccactgccgcaaattttttcttcatgaacgatcacttccttttcatcatggttttcttcaggctgtatactgtttggataaagtatacccgaaagaaaatcggcggaatcaaaatttccttttatacctcgtcgctttccacacgggaaatgagggcaccgagatttctgaacttctcttcgatatcttcatagcctcggtcgatgtggtagatgtcgtgaatatgggtcttgccttccgccaccaggcccacgagaatcagtgccgccccggcgcgcaaatcgctggcgcggacgtgggcacccttcagatgcttcggcccgatgaccacggcgcttctgccgtcgattttaatgtccgcccccattttttcaaattcttccacgtgcataaagcggttttcgaataccgtttcgatggtcacattgctgcccttgcactgggtcatgtaggccataaattgggcctgcatatccgtgggaaagcccggatagggcagggtcttaatgtcgatggcttcgggaatggcccggccgatgacgcggacattttccccttcttcgatgacttcgacgccggattctttcagcttggcgatgacgggcttaatgtgattggttatgacattttccacgaggacatcgccgccggtaatggccgccgccaccataaaggtgcccgcttcgatgcggtcgggaataatggcgtggcgcgcgccgcctaatcgctcgacgccgacgatgcgaatggtggatgtgccggcaccggtaactttagcgccgagctttctcaggaaattggaaagatccacgatctccggctccttggccgcattgtcgataaccgtttccccttcggccagtaccgccgccatcataatgttttccgtggcgccgacggaggggaagtcgagatagatcttttcgcctacgagcttgtcgcaggaggcggtaatgtttccgatgtcttcgtgaatctccgcacccagtgcgcggaagccttttaagtggtagtcgattggcctcgcgccgatggaacaccctccgggaagggagttttccgtcttgcccatgcgggcgagcaagggccccatgacgagaaaagatgcccgcatcttgttcattaattcgaaaggcgtcttgtattccgagagacctgcggaattaatcttaagcttgcctttgcccaaaacttccacttcgctgcccaaggcctcgagaacctgacacataatgtgcacgtcttgaagctccggcacttcttccaggtaaatatcctctgtccctaaaagacaggcggccagaataggcaaggcggcatttttcgctccgctaatgcgtacgcgcccctttagggcaggacttttttccacgacgattttttccaaaaatattctccccttacttctgctgatttattgaaaggacctcagtcctcataatacaaatagaacgccgggagcatacactccgagcgttcttattgtatcatatttaaagccgtcgcaaaccatggtttacggcttttgtcatcaaatccctcgacgaatcacttccgtcttatagccgtcgggatccgtgacgaaaaagtagcggggcgcttcgccgggcaggccttttaattccgtcacatcaaagccttccgccttcatgcgggcatgatccgcctccagatcgtcgctttccacagccacgtggccgtagccgtcgccgatgtcgtaggcgccgtggccgatattgtaggtaagctccagctccgccttgtccccttccagggccaaatagaccaacttaaagccgtcggcactgtggtctttttcgcgggtcacatgatagcccagggccttttcgtaaaaagcaatggaagcatctaaatccttgacgcgaatgcaggtgtgtgcgtaattcacgacctcaccctttcaattttgtctacataaacgcccttgtccaaaatgggatcgtactcgattttgtgaaggctcgcttttctcacggccaccacttcaccggtgatctcttcgatggtgtagcccaaagagggttgatgggcgataaacaaaatgggctcgtcggtaatataggtcttcatgttccgccagcgggtggcgtctttgtagctcacgaccttcacatcgtgtacgcctaatttcttcgccatgacctccgccgtttccacggcgcgcttatattccgaaacgatgatcttttggggcaggggccattccctgcgcaagaaagcttccgccgtgtcttccgcttgaaaaataccttcttgagtcaaggcgcgctcttcatcgcgagaagccacatcttccgccttgccgtgtcgcattaaatataaaatcataatgacctcttatctaaacagattttttccctcgtagcgggccaattcgcccaattcatcttcgatgcgaaggagttgattgtacttggcgacgcgatcggttctcgccggcgcgccggttttaatttgtcccgtattcagtgccacggccaaatcggcgatggttgcatcttccgtttcgccgcttcggtggctgatgaccgccgtcatggacgcccgatgggccatgttcacggcgtcgatggtttctgtgaggctgccgatttgattcagcttaattaaaatggaattgcccacgccttcttcgatgcctcgcgccaagcgcttcacattggtgacgaataaatcgtcgcctactaattgaatcttcttgcccagacgttcggtgagcattttccagccttcccaatcgtcttcatccaggccgtcttcgatgctcttcacggggaagcggctcacgatgtcttcataccatgccaccatttcttccgccgtaagctctttgccttcgccttttaatacatagacctttttgtcgctatcgtacatttccgatgcggctacgtccagggcaaagacaatgtcttctcccggagtgaggcccgcttctttcacggcttccacgatgagttccaacgcttccacattgctctttaagtcgggagcgaagccgccttcgtcgccgacgccggtggaaaggcccttggatttaatgacttttttcaggtggtgatacacttcagcgcccatgcgcaagccttctttaaagctttcggcaccgacgggcataatcataaattcctgaatgtccacattgttatcggcgtgttccccgccgtttaaaatattcatcatgggcacgggcaaggtacgggcgccgacgccgccgatgtattgatacaaaggcaggcccaattcgtctgcggcagctttggccacggcgagagacacgcctaaaatggcgttggcaccgagctttgccttgttttccgtgccgtctaaatccaagagggcttcgtcgatgcccaattgatccaatacgtcgtagtcgagaatttcgtgggcgatgacttcattaatgtgggccacggcattttcaacgcccttgcccaggtagcgatcgccgccgtcgcgcaattcgatggcttcataggcgccggtgctggcgccggagggaacgatggcccggccgaaaccgccggccgccgtgtacacttccacttccaccgtggggtttccgcggctgtctaagacttcgcgaccataaacttcaataatgctgctcatatttgctccttatttccataaactgcggccggtcatggcctcgggttgttttatattcagctcctccaacatggtgggggcgatatcggcgagaacgccgtcgtccagcgcccgatcaaatcccacgggaatgaggaagacgggattggtggtgtgggaagtgacgggatttcccgccgcatccttcatcacgtcgcaattgccgtgatccgccgtaatcagcgcccgcccgccttttttgcgaatggcttctaccaccgattccaggcatttgtccacgacacccacggcctgaatggccgcatcgaggtttcccgtatggcctaccatgtcgggattggcgtagttcacgatgtagacatcggccaaatctttttcaatggcgttaattaaatggctgctcaccagctccgcccgcatccccggctccatatcgtaggtggccactttcggcgagggaaccaaaatgcggtactcccctttaaagggattttccctgccgccgtttaagaagaaggtgacgtgggcgtatttttccgtttcggcgatgcgcaattgcttcatgccctcacgggccaagatttcgccgagggtgtctttaatttcttccttgggatagatcacgtgggtgttggggatggtgtcgtcgtaatcgatcatggtgactacgtgcatgtggggataaacttttcggtcgaattgatcgaagccttcatcggcaaaggcacgcacgatttccctcgcccggtccgggcggaaattgtagaacaagaacacgtcgccgtcttccatgcggcccacggccttaccattccgctccaaataggcgggctcgaaaaattcgtcggtgttgtccgcctcgtaggacagggcgaaaatcgaatcgctgtcggtaaaggctcggcccacgccggaggtgaagaggtcgtaggctttttccacccgctcccagcgattgtccctatccatggcgtagtagcggcccacgaggctcacgagctcaccggcgccccatgcatttagcttggcctgaagctttttcacttcttcccgcgccgatgtcggcgccacgtcacggccgtctaaaatgccgtggatgtaaattttttccacaccggccgccttcgccagctgaatcagagcgtagaggtggtctcgatgggagtgcacgccgccgtcggaaagcaggcccaccaaatgcagggcgcctgccttcgccttttcaaaggcctctttcagcaccttgttttccgccaaggtgccgtcttccgcatctttcgtaatgcgggtaagctcttgatacacgatgcggccggcgccgatgttcgtgtggcccacttcggaattgcccatttgtcccgcaggcaatcccacggcttcgccggatgcctccagcacgccgtagccctttttcatgaggctgtcgataaagggcgtctcggccatgtaaaaggcattgttcggccccgcttcggcaaggcccagcccgtctaatatggccagaagcatgggtttaaccatgggacgcctccccgacgatggccttaaactcatcggcctttaagctggcgccgccgacgagcacgccgtcgatgttttccttcgccacaaagcccgccacattggaagacttgacgcttccgccgtagagaatccgcaccgtatcttgaacgtttggatccaaggcggcccgcaccgcgccgatgactgcatcggcatcggcggcatcggcggttttgcccgtgccgatggcccaaatgggctcgtaggccaaagtgattttatctaaatcttcgattcccgcaagggaatcttgtacttgcttctttaaaaagtcgattcgttcgccggatccgtaaactgcttcgctttcgccgaagcagataatgggaagaaggcccgcatccaaggcacgggcggcttttttcgccaccgcctcatcgctttcgccgcggccgcggcattcgctgtggcccacgatgacgtaatcgacggaaagatccgcgagcatttccgccgcgatctccccggtgtgggcgccgtaggtatcttccgatacattttgcgcgccgatgaagacatcggtgtccttcagtgcccgggccacccgatcgatgtgggtaaatggcggggccacgagcacgtccacggagcttgtgtccacgtcccgaagggcctcggccagagcttccccttcaaccacggtggtgttcattttccagtttccggcaattaacaaccgtctcatcttacacctctttcataacggcgatggcgggaaggatttttccttccaaaaattccaagctggcgccgccgccggaggagatgtggctcatcttatcttcaaggcccgcctgtttaatggccgccgcggaatcgccgccgccgatgaccacttcggcatccaaatcgcctaaaatcttcgcgagagccacagtgcccttgtcgaagggcgccgtttcaaagacgccggccggtccgttccatacgacggacttggcgtgttttaatccttcgccgtaggcttttaccgtatcttcgccgatatccagggccatttcatcggcctgaatgtcgtccaaatgggcggtgcggacggtcttcggttggtcgatgcccttggctacaaccaaatccacgggcagattcaacgccacgccttttttctcggccttggccatgagttccttggcgtgatccacttcgtcgacttccacgagggatgcgcccataccgtggcccttcgccaaaaggaaggtgttggccatggcgccgacgataaagatttcatcgactacgttcattaaattgtcgatgacggaaattttatcgcttactttcgcgccgcctaaaatggccatgaagggacgtttaggcttttcgattaaatcggaaagcacctgcacttctttgcccattaaaaagcccagtgcggcaggcaatttcttcacgatgcccacattggatgcgtgggcccggtgggcggtgccgaaggcgtcgttgacataacagtcggcgagggatgccaattcagcggcaaaaccgtcgtcgtttttcttttcttcatttctgaagcgcagattttccaaaaggcccatgtcgccgggcgcgagctcccgggccatgcgctcaacattttcgtcgaccacggcgccggagaacatgggaatgatcttgtgatccaatactttttccgccgccttcaatacaggcgccatggaaaatgcttcgtcgtaagttcccttgggacggccccggtggctcattaaaatcaccgatgcgcccttatccagcaagtagtcgatggtggggcgagccgcttcgatacgggtcacatccgtcaccttgccgtcttttaccggcacattaaaatccacgcgcaccaagacgcgtttgccctgaacgtccaattgttttaagtccataattcctccaaaaaaatcgagcccgtaaagagctcgacttcctattacatcttttctgcaactaagcttgccaagtcgatgactctttggctataaccccattcgttgtcgtaccaagagaagagcttcacgaaattgccgttggccaaggtaagggacgcatcaaaaatcgaagcgtggggattggcgataatgtcggaggagacgatgggctcttccgtgtattccaaaattcccttcatggggccttctgccgcctttttaatggctgcgttaatttcttctacggtagcgggttttttcagttcgaaaaccatgtctgtaatggatcccgtgggaacgggtacgcgaagggcgtggccgtcgagtttgcccttaagttccggcaatacttgtgccacggctttggcagcgccggtggaggtggggataatattttccgccgccgcacgggctctgcgccagtcttttttgtgcttggcatcgtggatcttttggtcattggtgtaggcgtggaccgtggtcatcatgcccttttcaatgccgaaggtatccagtataatctttgtcaccggcgccatgcagttggtggtgcaagacgcgttggacaggaagtggtgcttttcgttgtcgtaaagatcactgttgacgcccatgacgatggtaatgtcttcgcccttggtcggcgccgatacgatgaccttctttgcaccggccttgaagtgtttttccgcgccgtcgcggtctttaaatgcgccggtggtgtcgatgacgatgtccaccttgttttctttccaaggaatgttttcgggatcccgttcgtcggaaataataatgtctttgccgtcgatgttaaagcccttgtccgttaccttgacggtgccgggatagttgcggtaaatggtgtcgtggcggaacagatgggccataagctcccagtccccactggcatttaattgaaccaattcgaagggcaggtcgtctcgtaagcaaattccgcgaatcacgtcgcggccgatgcggccaaacccattaacacctacacgaatagtcattgtatcctccttgtatcgattgtttccgattgttatctgtttaaatgatacccaaaggcgggaataatcaccgccctcgatcataaaaatccatccttttcatcatatcagaaactgcccctcaatgcgataagcaatgataaatagaaaggacaaattatgctcttcgtcctccaaggtccttccggatcgggaaaaacgacccaggccgcccttttggcccgcgaaaaaaactttgaaaaaattattaccgccaccaccagaccgccgcgggcgggggaaatgaacggccgcgactattattttctcgacgaaaaaacctacgacgcccgcctgaaaaacggcgagcttttggcccccaccgccattcacggggcgaaatacggcatcccgaaggcggatcttctttcgattattaaaagcgatgcgcgccacgccgtcgtcgtgttagacgacaagggggcggaggaattgcgcgccgccggggcctatgtcatcggccttcgcttagacgaggccacccgccacgcccgcctcataaagcggcgggatgaagaccgcttcgacaaggaacatttcaaacttcaatgcgacgccatcgtcgacggttccggatctgaagaggcggtgttcgatgcgttgaatcaggttgtggcccgtgcccttatcgaaagaggaaggtgaaatctttcacaaaaatttttcgttcccgtaaatttttcttcccttttccccgccattttataaaatttttgatagaatgagtgggaggtgacatgatgaattatttatacgtgttcgcagctgcattcctgttttcgtctatggaggtcgccattaaatttaccggcggcgcctttaatcctgttcaactaaactttatccgctttttggtggcggggatactgctctatcccattagccgcaaagagctttcaacgcttacatacaaactggtgaaaaaagactacctccacttcgcctttacgggctttttgtgcatcgtcgtgtccatgaccttctacaccttgtccgtctccttcctcgacgcccacgtggccggcgtcctcttttgcgccaacacttttttctccatgctcctggcccatttctttaccacggagaaaatgaaccggcccatgctcttcgccgtggccctgtccttcgtgggctttctcgtgctcattaatcccgcccacttcaagggctcccttttaggcgtcgtcatcatcctgatctcggccctgtccttttccgtctacgccttggtgggaaaaatcctctacaaagacgctccctttaaggcgcccaccattacctcccgctcctttctcttcggcgtggcggaacttttcatcttgattatgatctcccgcacggcccccgtggccggcgccctgaaagccgtgggtctcgatgtcttcgcggagatccccattctaaagggcattgccccggacaacatcctcattcttctctacatttccgtcttcgtcacgggcctgggctttgccagccaccttttcgccgtggaaaccaatcccgtagccgtgtcctctctggtctttttcgtaaaacccattctctcgccgatcctgtcggcgatttttctcggagacattgtttacaagcacgaaatcgtcggcatcctcctcatcgccgcggcatcgagcttgattatctacgaacaacaccgccgagagcaaaaagccctcgcagaaaaataaatacaaacagcctttctgggcacgaaaaaacggaggcgcaaacctccgcttttaattggctcatttggcgatttcaacggtggaaagaatttccggcaattctttccgcgcgtcattgtaggctttttgtaattccttgttttccaaactggtttgcacgtcggaggcgcagataaagatcaggtacttgtttccgatccgccccacgacgtaagagggaatgtcgccttccggtttgtcggcaatgtcgaagcagcccacccagccgatggattcgtcggcggcgtggtttttcttttcgtagaggctctttctcaaaaagccgctatccattttttcttccttgtacaggaacatgtctttcttgtcttcgggaatggtgaaggacacatttttatagagcgacactttttcgcccttcaccttcttgccgatttccatatcgccgaaaagggccgtgcgattcttttcgtcccattgaaccttcacgccgagggcttcggcgacgaaacgcatgggaagataggtgcggtctttggaaatccgcggcaccgtgtccatggtcttcttcacgccgttgaccgtgtaagctttcttgccgatggtcatgaccactacattttttccgttggtcagggtgacttcccgggtcttgccgttccagtccgcttttccgcccagaccttcggcgacgacgcgaacgggaagagtgatgcggtcgttcttcacttctacgccggtaaagccttcgtacatgccggcttgaacgcccttaatatagacgtcgatggggtattcgtcgtcgtcttccgggccgttggcaaaggccaaagtgggaataaagcacaaggccagcaaaataagtacaaattttttcatgttttctcctttctacaacagtatctatatgagtattgtacccccctccgataaaaatacaaccaataaaaataaattgcaatgcctctcgcatcggcgtatagtatttcccggagatcgtatttttttaaacgatactcgccccgtttaaggggcaggcaaaaccagcggatttttccgccgacaattttacaaggagaattatgcaagtagagatgttacagggaaaaattcaccgagcgacggtgacccaagctgaacttaactatgtgggaagcattaccatcgatgaggcgctcctggaggcctcgggtattagagagtatcagaaggtgcaagtggtggacatcgacaacggctcccgtttggagacctacaccattgccggcgaacgcaacagcggcgtgatttgcttaaacggtgccgctgcgcgactggtctctgtgggagacaaggtgattattatgagctacgccgcctacgaggccaatgagctttcggactacgcgccgaaggtggtctttgtggacgaaaacaacggcgtcaagcaaatcgcgacctacgaaaaacacggcaccttgtcgtaaaggcaatgcaataaggggcgaaattcattttgcccatgaaaaaacccgcttcgaagcgggtttcataatcaggatgaaggaaggattcccttccttctttttttgtgccaatccttaggacaggatcaggttttgaatgtcttcttccacggttccgttgggggcgatgttgaagttttccaccagcaccttcaccacattgtcgcttaagaaggcgggcagggtcggccccaggtgaatgttctttacgcctaaggacaagagggccagaagcacaatgacggccttttgttcgtaccaggcgatgttgtagacgatgggcagttcgttaatgtcggcgagcccgaagatttcctgcagcttcatggcgatgacggcgagggagtaggagtcgttgcattggccggcgtctaagacgcggggaatgccgccgatgtcgcccatgtgcagtttgttgtagcgatacttcgcacagcccgccgttaaaatcaccgtgtcatccggcagggccttggcgaaatcttcgtagtaattgcggtccctttgccgtccgtcgcagccgcccatgaccacaaatttcttaatggcaccgctctttaccgcatccacgactttatccgccagagcaaacacttgattatgggcgaagccgccgacgatggtgccttcttcgattttttcaggcgccttgcagcccttggcctgttcgatgatggcactgaaatccttgtgtcccttgtcgtcttcgtcgataaatttcgcacccggatagcttgccacgccggtggtatagaggcgatccaaatagctgccttctttcggaggcacgatgcaattggtggtcatgagtatggggccgttaaaggaggcgaattcttctttttggtgccaccagctgccgccataattgccgacgaagtggtcgtatttcttaaatgcgggatagtaattggcggggagcatttccgagtgggtgtagacgtccacgccggtgcctttcgtttgttcgaggagttcttccatgtcctttaaatcgtggccggagattaatatcccgggattgtttcgcggctcaagggacacttccgtgatttccggatggccgaattttgtcgtgttggcttcatccaagagggccatggcctttacgccgttttcccctgtttttaaggtgagggccacgagctcgtccaccgttaagctgtcgtcggtaattttttccaaggcttccgccataaatgcgtgaacctcgtcatctctaaatcccagcacattggcgtggcgggtataggccgccgtgccctttaagccgtaggtaatgagctcgcgaagggatcgaatgtcttcatctttcgtggcaaggacgccgattgcatcggcctttgccgcttccgtaagcccttcccgcacgtcgaatgcagcttcggcggggagatcactcatcccttgggccaattccttcttcatgtccagggtctttacaatgtattcttccaccgtttgcggattgaaattcgcattggttatggtggtgaaaagattgtcggcgatgcggtcttgtacctcttctttcatctcgcctaaatcccccttgcgattagccacttgagccaggcccttggtgacgtaaatcaacaaatcctgcagatccgccacgtctttcgtctttccgcaaaccccttttaccgtacagcctttattgccggcggtttcctgacattgaaaacaaaacataagctacctcctatttcttctttgcttgatcgtattttcagtataggtgccggcgaaaaaaatagacgtaacttttgttacgcctaagccattaaaataataaagtttccaaggttttcggatcaaaggacacgtttcgcccttttaaatcgataaatccgtcccgatgcattttcatcagggtgcgggagagagaaggccgtggcacggccaagtaatccgccagcgcctcccgactcattaattcgaaatcttcccccgtggggttcacaaagagcaggtggcgggcgatctttttctgaaggctccccgccgaaagcaccaccatcttttgattgagaaaatacgccttcttcgccaataccgtgagcatattggccgtcattttctgcgccacgtcgccgcctgcgggatcgaaggcgtccttcggcagaaagaggaaacggctgtccttgacggcgcgacaggcaaaatcatagggcctgtcatctaaaaaaagatacacctcgccgaagaccgtgtccttttggcgaaaacgattcaccatttgccgcttgcctgaaaaatcgtttttctccacttccacggccccgcccaagagaataaaaagccccttcgcctcgtcgccttcgcgaaacacatagtctcctgatcgaaccgttgtttccctcgcactgcacgcctttaaatgctcgcgcagcgcctgctcgccgatacctgaaaagagagtgtgtctaccggccacggccttcacctcgtctcaagcggcgcaggcgaaaattcgtctcgtgcacggcccgggacagatccgccccggtgaaaaaccgccgtcgagacgaaagcctggccctctgaatccgccgcgaaagatacatagggcgccgcctgtttgaaaggctgcgcaaaaaagccgcagccaccgccgccgacgccttttttccgagaagaggcaagactctatccgactggcgctttttaaatcgacgcaccgcttcttccgcttcaaaggcccttgtcctattctgtttatcatctataatatatcgttcaaatgtatgctttttcataaagccctcccgttaacagatatctttctataaaaataaccaaatacgctacatattaaaccatttaacgaaaatttaggtgtaatttgctaaatttccacgactcctttcgcaattatgttttatatggtatattgtccttagcagaaaacgttaccgaagtaagctaatgttttctcgctgcgattctttaagaaaggaagaaattatggattggaagaagcatcacaggattctcattattaccggccacttcggcagcggtaaaacggaaatgtccatcaacttggccctcaagcttcgcgaggagaatgaagaggtggcggtcgtggatttagatattattaatacctacttccgcatcagagataaagatgatctcatgaatgaaaaggggatccgcaccctctccaccggcgtgaaggcaagagccgtggatattcccgcgctggatccggcgatcgacgcgattcttttaaacaaggacacgcgagtcatcgtcgacgtcggcggaaatccctccggtgctcgcgccctcgcccgctatcgcccgactttggaagacacggggtatgaacaaatctttgtcattaactccaaccgcccggaaacaaaaacgcctgagcaggtcatcaaatttatggaagacacccaggctacgagcggtacgcaaattaccggcttgttcaacaccgcacacttcctgaagcacaccacagccgacgatgttatcgaaggcttgaagttggccgaggcggtcagcgaccaaacaggcctgcctctgttgggaacagtttgcaagagcgacttagtcgatgaagttcgagcgcgcacaaacgacgatctgtatattcttcccatcgatctctatttccgagatcaatggatgctataaggaggaaaaccaatggcaaaaggaaaagtcactttcgatcaagagtactgcaagggttgcgccctctgcgtctctgtctgccccaaggacgtcttggctcttaaaaccgacgaattaaacccgaagggctacagacctgcctacgcaaaaaatccggatgattgtatcgcatgcacatcttgtgctatcatctgccccgactctgtcatcagcgtctaccgcatcgaagagtgaaaggagtctcacatgtctgaaaaaattctaatcaaaggtaacgaagctgtcggcgcggcactcatcgccgccggttgtaaaacatatttcggctaccccattacgcctcaatccgaagttcccgaatacttagcaagagaattaccgaaaatcggcggcacgttcctgcaagccgaatcggaagttgctgcaatcaacatgatctacggctccgccggtaccggtacccgcgtagctaccagctcctcgtctcccggggtttcccttatgcaagaaggcatcagctacatcgctgcttgtgaacttccctgcatgatcatcaacatgatgcgtggcggcccgggcctcggctccatccaaccgtctcaaaccgactatttccaatccacgcgcggcggtggtaacggcgactatcgtaccttaaccttagcaccggcatccatccaagaaatggttgacttaattcacttaggcttcgacttggcagatcaataccgcacccccgtcatcatgtgcggcgacggtatgctcggtcaaatgatggaacccatcgaatttaaaaaattcgaaaccaagacattcgacaaatccgattgggcagccaccggtacccaaggcaagcgcgaaccccacatcatcaactccctcttcctttctcccgacgaattggaagcacacaacctgaagttgattgctaaatacaaagccatttctgaaaacgaaaaacgcgccgaagtcatcgatgttgaagacgccgatatcgtctttaccgcattcggtaccaccagccgtatttgtaagtctgcaggcgaactcttaaaagccaaaggctacaaagtcggttacgtgcgccccattaccctctggcccttccccaacgaagcttacgacaagatcaatgacaaatgtaaagtcatcttggacgtggaattgaaccaaggtcaaatggtcgaagacgtacgtctttccgttctcggcagaatccccgtagaattctacggtcgtcaaggcggtatgattcccacggctgaagaaatcgcagacgtagctttaaagttattggaggcgtaaaatggaaaaacttatctacacgaaaagcaaagcattaaccgatgtccctactcactactgccccggctgtacccacggcgttatccacaaactcgtggctgaatgcttggaagaattaggactcaccggcaacaccatcggtatcgcaccggtaggctgcgccgtactcgcatacaaatacttcaactgcgatatgtatgaagccgctcacggccgtgcaccggctgttgctaccggtatcaaacgttctacgcccgacaaattcgtcttcacctaccaaggcgacggcgacttggcatccatcggttccggtgaaatcgtacaagcggctcaccgcggcgaaaagatttccaccatcttcgttaacaacgccatctacggtatgaccggcggccaaatggcccccacgaccttgatcggccaaaagaccaccacttctcccaccggccgtcaagttgattggtccggacgccccattcgcattgccgaaatgctcgcaaccatcgacggcgcaaaattcgtcgaacgtgttgctgtaaacactccggcaaacatccgcaaagcgaaaaaagccatcaaacgctgcttcgaaattcaattagaaggcaaaggcttcggtatcgtcgaagtactttccgcttgcccgaccaactggggttacccgccggcagaagcattgaaatggttagaagaaaacatgattccctactatcccttaggaaatctgcgtaacggggaggatctataatgactacaaacagagtaattgtatccggcttcggcggccaaggcgttatgggtatcggccaattattgacctatgccggcatgttcgataacaaacacgtatcctggttaccttcttacggtcccgctatgcgtggcggcgctgcaaactgctccgtcatcatttccgacgaacccatcggcgcaccgaacatctctactgccgatgcagccatcgttatgaacgaaccttctctggacaaatttgaatcctacgttgctccgggcggccacatcttcattaacagctccctggtcagcaaagacacctccagaaaagacattacttctcaccacctgcccgtcaaccaattgaccgaagaatacggcaacccccgtgtactgaacatgattatgatcggcgcatttaacacgatcctgaacatggtcagccaagaagctttggaaaaagccgttgacaaactctacggcaaaaaaggtgaaaagatcatgaagatgaacttagacgccctgaaattcggcgaaaacaaaatgaaggagatcctcaatgcgaaatgaagttgaaattctgagacgagccatgttaaacgaagtggaaggtgctgaattttacaaactgtctgcagaaaaattcgctccctctgctacgaaagacgctctcttagacttggcacgccaagaagaagaacacatcgaatatttaagaagcctttccgaaaagctcatcgacggttccagaagcattaacttcgaccccgaagcccttaaagaagaagttccctctccgggcatcttcaaatgggacaaggttgacgaagacatggttcgcttggcagttaccgtcttctccgtaggtatgaacatggaaaaagattccgtgaaattctacagcgaagctaaggaaaaagttgatagcgaagaatccaaaaagcttttcgacatcttagttaagtgggaagaaagccacctcgaaacccttcaaaaacaatacgacatctaccaacaagaatggtggaacatgcaaaactttgaacccttctaaagagaagagtttctcgacaaaagagcccgcttcggcgggctttttttgttgcactttctttatttgttcaaggcaaatttccgctcgccgctttatctatgagactccccataaacggcagcagaatttcgtggtacaatacatataagaccacccgttcatgtattgaacgcaaaccgaagtgaaagaacaaatgagagatgaacatgaatcaaacagaccctattcaagcatttattgaaagcaatccccttcccgcggcctacaagagccgcattcccgatccccgcttccgctaccacggcgaggagatcctgcgtgccgccaccgccgccattttgtccgggaaaaatctgcttctcgtcggcgaaaaatccacgggaaaaaacgtgctggcggaaaatttggccaagctttttcagcggccattgtggaatgtgtccctgcacatgagcatcgacgccgcggcccttatgggcgacgacagcttaaaagacggcaatgtcttcttccgggaaggccccattaccatggcatcgaaagtcggcggctttgccgtgctggacgagatcaatatggcgaaaaacgaagccctggccgtgctccactccaccttggactaccgccgcatcatcgatatgcccggctacgacctcattaaaatccacccggccacccgcttcatcgccaccatgaacgagggctacgaaggcacccgggacttaaacgaagccctgctctcccgcttcgtcgtattgaaaatgcccgccatggccgaggcggatctgaagcaattaatcgaagagactcacccgcgtctaaagcccgcctttgttcgcgacctggcccgcctcgtggcagacatggacaaaaaggccgccgccaacgaaatcccccgccacgccgtagacattcgcggcctcttcgacgccttggatctggtgaaagaaggcctggagctgaaaaaggcccttaccatgaccttgtcgaacaaactcttcgatcccttcgaagaagaactcctcgccgatctgttcaaggttcgtttcaaagacgccttgtatttcgacgacctcgcggactgatccatgaacacccgcggaacaaacagaaccgacaaccttcagtgggcgggagcggaaaactaccacttcgctccctctctctacggcaaagacctggcggggaatgatgatttctacttaaacttcatcctgggccttgccgcaaaatacttcggtgccgaaaccttggagcgcctcttcgcctccttctccggccaaattctccgggagaaatacgatctcttcgccctctaccttttggaagaggccgtctatcaccgcgaagtgaaggtgcggccggtgctttcagatctcagacgcgccttcgcccgccgctttttagacgacgcctacgacctgcgcaggcgcaccctggccctgcggcaacccctcttctacaccatggaaatgaagcgcacccacgacatcctcggcctgccctataaaaaactcagcaaaaaagaaacggccatctacggcgatcttcgcctccccgaagacacgacggcatcggatctccaggcccgcgtggaggccctcttcgcccgcgacctgcgctttcgaaagcacgcccggcccccggtgatccccttgcccgccattcacctcttctccattcccggctacgtctccgtggcccgagacaatgtgcccggcatgtttcacgacggcggtggcggcgatctgcccctcttctttcatttctttcgcgccatgaaaaaaagccgagacgatgacatcgaaaaaaccttcggcagaaaccttttctccgacgaaaagagccttgccctgaaccgcgccatttgcacggagggccacagaaaatcccgcatctactttacccgcggcatcgacgagaaagacaaaagccaggatcaggatttaaacgcccgcaccgtgaaccgccacctgctgaaatttcaggaaaacaaaagcagctacaaccgcgccatcaacgacttgacccgggcctttaagctgaaactggcttctgttaccaccacgagcggcgaagtagcccgccgaggcaaactcattccccgccgcgcctttcgcgctgaaatatcgggtcgcgccgccattttcgagcgaaaaaacctccttcccgccccgagctttcacgtggatctcattctcgatgcctccgcttccctcctcgccatcgaatcggacatcgccatcgaagcctatatcctcgccaaatccctggaaaacaacggcattcgaaaccgcatcctctcctaccaaacggtggaagataccaccgtcgtcaccattttaaaagacgacgacgatccctgcgacatgaaacaaatcttccgctacaaagccatgggctggaaccgcgacggccttttctttaaagcctaccccacccttctcgatggaaaggcgccgcagctttccatcgtgctcaccgacgccaatcccagcgacttcaagcccctggcgggaaaaggcctgcgccccggcaaggcctatgccgacaagcccgccctggaagatacggcccgctacctggacgccctggcgcgtaaaaacgtgaagatcctcgccctcttaaacagcgaccacgtggataatgcggacacacttttccgccaccgcttcgtgaaaatccaaaaaatcgaacaaatcgcccatgtggcaggcaaatggatccaaaaagaactggtgaaaatgaattaaccacgcaataaacatcccccggcgtagtagagtgaccccataaagttggacttaatcgagtaagcatttcgcttactcgattttgttttacataacattcgttctatgcggattgcatgcgttcacggtactctttcggactcagacctcctaacttttctttgattcgatcgttgttgtaatagcggataaaattttcaatggcccgaacgagttcttgccggctttggtagacgtggccggcatagatttctcttttcagtacgctgaagaagttttccatgggtgcgttgtcgtagcaattgccttttctgg

SEQ ID NO: 44 - DNA, 30200 bp, Peptoniphilus rachelemmaiella
  source 1..30200: mol_type = genomic DNA
cttgtttgccccctttattaatttgtggtgatttaattttaggtgattgggaaaacaagtgctatctttttgcataaaaatatccattaaggagttactccccaacggatattatagagccaaataatattaaaggtctgtctggcatatttccaatcctcctttatttttatttgcaataattacctgagactgccaactacgaatggccttctcggtaatttccttcacattatcattcggcagacttaaaatatactgtctataaactgataatgcaaattcctccgcttctgcatagcttatgcctaatgtttttttcgcaagtgtgctgggctgcaaaccgaacttaaaatctttttctttttcaaaaaaaagatagtattcctccaaattatttcgggttggttttggtatttctagccggacttgaaacctacgccatgctgctttatcaagtaaagtatcatgatttgtagcagcaataacaatgacataacttggaagtgcatcaatttgcatcaataaagagcttactacacgtttaatttcaccagtttcatgcgtgtccccacgttctttccctagtgtttcaaactcgtcaaaaaacaaaacacactctctggttttcacataatcaaatagtcttgataatcgagatgcggtttcaccgagataggaacctataatattttcatacctaactgtaagaagtggtatcatcaatgcttcggatattgcttctgccaatgaagtttttccgtttccgggaggaccaattaaaagaattttatttcgtggttctatgccgtatgactgcagtaaatcggaacggttttgttctgttattaaatcttgacaggttaatttaatatgatttggaagaatcaaatgatctagtctttttttaggaatcttttccaagaaaagattttgttcatttgtcccaccacggatagtcgttggtgaaaacaatttatctttcgcggtatctttttttgatttttttaataattcatcaatttttgctgcaagtactgtatgctgctttgaacgttcttcggcgcataacgcctcagtagctttcctaaagtttgtatagtcatttattaaaccatattttattaactcacatatcaaatctgctcttgccataattttttacctcctaaattttcaacgataaatggcaagcgattctataataacccatccggaatatcgatgaaattattctcacaaaaatcaaaaaaacttttcactgctagattgcttggtgtaacatgacagttctcccagcggttaatagtcgaataacttacatttattgcactagcaagctgctcttggcttaaatcaaggttctttcgcacaaaaataacaaactctgaaaatgtcattatcatacctctttcttaatatagcatatgccattatttttttattttattatagcatatgccatattttttccaagaagtctcttaaataatcttattctatatcgctgtgatcgatctgaataatatatccgtctattgccattttccgaaggtacgcttccatgttgcttgtaggcacctgtttcatcttttcttctatcaaagtgcgttcttcttccgtaacacgaaatttaatctgcacatttctttttctgttattcataggtgaatttcctttctgcttttatagagggtttgggacacttcccaagagtctaccccagcagactttagcctgcgagggtacaagcaaaatctctatcgccgaaactgcggaaaatagagattttttacggaaagggtacccctttcctatgcttgctattcttcttatcccttaatctctataacaacggtaatttgccttttgccaaagcacagaaagaaaaaacgctacaattttttataactgcaacgtttatttcatataaccttttcaattggtttttgacacactatgcgtttgattcttctggtttctttgcaataaataatatatatattagcaataatatttgttagttgactctaactgtacatggtgttataataaaaaccaacacgatgtcggaattggtagaaatgaaacggggtctttattttgaaagaagagaaacaaaaagttggacaaatcagaaagaaagaaattcgggaagtcgcaaagaaaatttttttaacgaaaggctttcaaagtacaactatggaagatgtcattacagagatagggatgagtagaggaggtgtatattatcgttacagaagcaaggtagagatattacatgatttaatgagagaaggcatggcttatcgtatggctaaaatgaatagttttatggcggattattctagtgagcttggtaaagaagctatcgcagaaatgcttgtcgacaggatgcttgatgaaaatgagttaatgagtatatatgtaatgtatctacaagctataaaagacaatgatgaattaaaagaattgtattccatattgaaagaagaaacactccattcggcttatggcggagatataaatggtgtaaaactgggtgattttagatggaatactacagattttatactttattttatgaatgcaattattttaggttgcgagattcttgaggcaagaaataatttccggaaaaatagagactttttaattaaagtgatgatgctttattttgactactacgatgaagggaaaataaagtaagaatcagcacagaggcaataataaagtaaaagaattaaattaggagggaaaaatggataagaaagaaaacaaattacaggtcaaggatttaataatgattggtgtattttctgcattatattttgtgcttaatatggttggaggaatgccttttgccatgaatcctatattaacattctatcaaccaattggaagtgcatttttatcaggaattatatttatgtttttaattgcaaagtcgcctaaaagaggaactattactattttggcagttatcatgtgtattttaagatttgctactggtatgcattgggctatgggagtaggaactttgatagccggaataattgctgaaattatagcaggaagcaagaactataaaaacaaaacaatgaatatgctatcttttggaatatttgcacttggtgacattggtacatttttagtatacttcatcaatccagaatcttggtcaaacgcaatgattaaaaaaggtacagatatttcatatattgaatccatgaatgctgcagctgctaattggatgatttatgtaatcgtaatcgggactttcttggttgctttgcttagtgcttggattggcatgaaacttttgaaaaagcaatttgagaaggccgggatagtgtaatgaagaaaaaatcaaatttacactttaacccatgcacaaaaatagttttactatttttgtgcatagttatctctagcctattgccttcgatagaatatgaattgatttttgtgtctataattgcactttttagcgttattaacaaaaaaatcaaatttgcttgtggaggcatactcatatatttagtagtgtttattgttagcgttttaactgttaagtatgggagtaacactgtcaggagtttgctaatgccatttttaggtttggttcacaaggtttatccagtgtgtatgctttctacgcttatactaagtactacaaaagtaggagagtttttatctgccatgagttatgcgagaatttctaaaaaaataactatccctctggcagtaatgcttcgatatatacctactgtacgagaagattggatgtatataaaagattcaatgtgtttaagaggtattacaccatctttttttggatttataaaaaatccggctttgacgatagaatgtatttattcacccatgataatcatggcttcaaaggcagcggatgaattaactattgcatctataacaagagggatagaatctcctaaaaagagaacatccattattgaaattcgttttgatattcaggatgttattgctttaataatcggtgttgtaattactgcctttataatttataggagtattttttatgattgaattaacaggaattagctttaactataagagtaccccaagcaacagcttgagtaatatagatttaaaaataaaaaaaggagaatttatcctcgtttgtggagcttcaggttcagggaaaacatctattacaagagtaataaataagctaattccagactattatgaagggcagatagaaggtaatgcaaaaataaataatgatttattatcgaactatcaaatgtttgaaatttcagaaatagttggtagtgtttttcaaaatccaagaactcagttttttaatgtggacacaaatagcgaaatagtgtttggtttagaaaatcaaggtatagaaagagatattttagaaaaaagattaactgaaacttgccagacattagatataagaaaattgcagaatagaaatatttttcatttatccggaggagaaaaacaaaaaattgcttttgcatcagtttatgcgatgaatccggacatttatttgttggatgaaccatcttccaatttggatataccgacgatagaggtgttaaaaaggcacttatctgttttgaaaaatagcggtaaaacagttattatttccgaacatcgaatttactatttgatggatttggttgacaaaatcatatatatggaaaatggacaaattcaaaagagttattcaaaaaaagattttttgaatttacccgaacaagaaattaaagcgatggggttaagatccagaagtgaaacaggacttgatataaaagaagatatgagtactgcagaacaagcatatttacaagttgaaaatctttctatacatagaaaagataagtgtattataagcaatcttaacttttttgcaaaaaaaggagatattgttgcggtgttaggttctaatggtattggcaaaaccacttttttaagaactctttgtggtttgcataacgattacgagggagacattctatttgattctaaaaagataaatgttaaaaagagaaagcaaaaaacctatatggttatgcaggatgtgaattatcaattatttgctgaaagtgtattttctgaatgcaaattaggaataaaaaattcaaacgatgatcttattgatgaaatcctaactgattttgacttatataaatacaaaagcaaccatccgaataccttatctggaggtcaaaaacagagattggctatagctgtagggttaatatgtaataaagaaattttaattttagatgaaccgacaagtggacttgattatagaaatatgcttaagactgcagaattattaaagcgttattccaaagaaaaagttatttttattgctacgcatgataatgaatttgctaatctaatttgcaatcgtgtattgaatttagagaaataaatggagatgtataaatttgggatattttaagaaggctatataagtatgcacctgaaaaaagagggtattcctatgcttcgatgattttattggcgataacaactattctttcagtgattccatatctttatttatggaagtttttgaatgagcttttagtggttaaatccattgaaaatacaaataaaattgtggttgttgaaaatgacaaaatagaaagtgccggagagcataagtatttattaaaaaattccacaagatatagaactttagtacagtatccccaattaacaagtgaggatgaatactaatgtggttcaaaaaacaagataaggataataatttatggaacaggatataaaaacgcaattactaacaaaaagaccaatagatttactctttcagttatctattcctgcggtcattggaatgatagtgattggtctatatcctttaatggatggaatatttgcagggaaaattataggacagatagcaatgactgcctgtggtgttgccatgacattgacaatatttaataatggtgttgctactttagtaggaataggatcggcatctgttctttctcgtgctttagggaaaggcgatctgaaaaccgtagataaaatcatgggcaacctaatattttgggtgatcttgttttcgggaataataacggttggaggaatactacttgcaccgtattttttagatatggtaggtgcgacaggcgaaatcaaagcttatggcatcagatacctaagagtgatttttatcggctctctctttgtgaactttacacagtctgcaaacatggttatgcgtggcgaaggtctgatgaaaaaagccatgatgattatggggcttggtgcattactcaatattattcttgatcctattttaatgatcgttatgggtgaatatgctattgaaggggctgcacttgcaactattacagcgcagtttgttcaagctgctgtaacacttaattatttcttgagaaagagcaaggttgtaaaaattcataagatacagcctgatgcagaaattaaaaaggaaatgttcggaataggttcatcagctatgatgatgcagcttctgtttatgattcagcatactatactttacaaaatggctttcaagtatggtggagatccgaacggaattttaatgtctgttgcacttcgtgtatatgccttttcgttcattccgctttggggaatgagccaaggattacagcctgttgtaggaacaaacttcggagcaaggcaatttgacagagtaaggcaagctatgaaagtattttctatcggaggagttttgcttgcagcaattttttggattccatcattgctattctcaagtcagatactttccatgtttggcatagaagcaaatattattgtaaaaggagttggaaatttcagactgttctattctgtatttattttgtacggagtaatggtcatgagcattaccttttttcaatctatcggaaacgggaagaaagcgggagttattgttatgttcaggcagctattcctgtttgctcctgcaatgattttattaccaatgatatttggaattaaagcagtttggtttacgcagccccttgtagatttcatcatgattgcaataggcgttgtaatgacaataactgaactaaaaaacatggaaaaatcaggttcgacacaaaataacaggtagttttatgagatgaattatataaacaacgaacgacaatggttactatgccccgtttgcaaaaacaaaacacgagtgaaaatcagaaaagatacggagctaaagaacttcccactgttctgtccgaaatgtaaacaggaaactttaatcaacgtcaaacaatttaatgtatcagtcatcaaagagccagatgcaaagacacagagccggtgattcacagttataaaactgtaattaccagctctttttattttaaggagaaacctacttatgcaaaagtctcaatacacaagttatatatgaccgtcgtttttatcctgcttgaataaagaagcggaagcttaaaatcaatcataggttatgaaacacggcggctctaaaggaggtatcgccgtgttcattttttattatcttaaaatcttgttaaaagggatatattctatttccgggttttcgtgcttttacggatgacctgttaaatcatatccataaccttattttttcatgtccgatcccggctgccctgcgcagtcgagattttttgtgcctgcaaaaaattttttcaaaaaatattcgcttttctttggcagtttttagctcttcgttgttgagggtttacgaaagggaaaattctacccgctttcgcggctgcgaaaggaggtgaataccatgaatgaacctgaaagaaccgaatggcagatacgctgcgcatttaacggcttctgcaagcggacattgaaaaacgaaagtatcaatgcccataaggagcttaaggagcggcaggcacacgaaattaacttttccgacctgacaccgaaagaggaaaaccagctttatacctgtgaagatttctttgcagaagataaagaagaacaaacctttttcgcaggcggaaaagaattgagtgcaaagctcatcgctgacgcgatccacagcttgccggaagaaaaaagaagagctgtcctgcactactacttctttgatatgagatatgcttacaaatatacagatacctttggaaaaccgcagtttgtgtacgcatggaaattagttcctacggataagacccctaagggcaagtgtgaggataaatccctgcgtgaaaaagtcaaggagatacaaaaagaccttgatgacgggattgcccctgtaggaaagaaaatgaccgtgtgccagctttacgaaaagcacatacgaaatcatgcaaatgtaaggcacggtacaaagcaaggtaggcagcatctcatgagaataattgaggaagatacgattggagcctacagcatcgagaatgtaaaaatgtctgatgcaaaggaatgggctttgcgaatgaaagaaaaaggctattctttcaaaaccatcggcaaccataagcgttctctaaagacagccttttattctgccattcaggatgactgtatcaagaaaaatccctttgactttcatatcaatacagtcattgaggatgacaccgagccgaaaattcctctttcgcccacgcaggaagaaagcctgctttcctttgtgaaaagcgataaggtctattacaagtattatgatgagcctatcattctgcttggaacagggcttcgtatctccgagttgtgcggactgacggtcagagatattgattttgagaatcgtacaatcaatgtggatcatcaacttcaatactccggtaaaaaatcgtaccgcattgaaattccgaaaacggacaacggcattcgtaaaattccgatgagtgaccgcgtgcttgaagccttgcagagagtactgcaaaacagcgaatccgcgtcattcttctttccgcaatagcgacaaaacatgcctcgttctccgccggcttgattggttgccatcttctcccttcctttcttttgtcataaaacaaaatacttcattattttatgtaatgtttcagtatattagaaaattcaaggtcatacaatacgaaggtgcggacggtgaaggagtgaaaactaatttttctttttctggcctttttcgtttacaaaaaagcttttattttacggagtatccccgtccctcgataaaacatgttaaactattgagtatgtaggtcgatgatgttgagaaaggacagtccatgggagcgaaaatcaaattatggtttattaacgaaaaaaacttgtttaagatgttgaaatatgtggcattgacgatggtactcctccttttgacgtgggttttcgaccatggataccccgagctaaaggcccgtgtgccggatcaattgcttttgtccgtggacgtaaccatggattttctatcgaatatttccggtgtgtttttgacgatcagtatattttcttttacgacgatcgttacggtgctgaataaatacagcagcagcgtgtcgcctcgtatgcttcagacgtttatcgaccgcaccgatgtcttggggcttttcggtattttcatcagtggctttttctattcggttatcagcattctcatgctccataatgtaggggccgacgacgatgtcatggcggggagctttgccatcgcctacgccattgtggccatgatcggctttatcgtctttgccaagcaggtgcttgagaacattaagatttccaacattatcgaaggggtgtacatcgattgcgacgccctcatcgatggggaggtggcccgtcgtgaaaaggcgaagcgctacgaagacgacaaggacgcgaaggaatttcccgtgttggccacgacgacggggtattttttcgaggttcagtccgagacgattttaaaggccctggaagggatcaaggcggaatttaccattaaaaaacgaatcggggaatacatcacggaaggggaatccctgggggtgttgaagcttttcggcgggaaaaatctcagcggagaagaaattgaagaactgaccgataccatcgctcgcgccctggtgatcaatatgtttaaaaatattcaagacgactaccatcacggcctggtgattctcacggagatttccgtcttggccctgagtccgggaaccaaggacccgaacacggcggtcatgtgtgtgaataaaatttcttctctcttagggaaattgctctccacggccaatcaatttatcgttttggaagaggacggggatacgaaaatcatctaccaaagctattctgtggaagatgagctctatttggtattcagccagatcatcacctattccggcggcgatccattggtcacgcgggccattttgcaggggctctatatgatttacatgttggcgggagcgtgcgcaaagcccggcgtgaaagatttcttcgactccgcctacgagctgcttatggcgaatttcacccacgaggtgcacctgatgcgattcgagcgcatccgcaagaatatggaagagcgggtgagcatcaaagaaggtcggcacttggcttaggttgtgccgaaaaaagtgacagggatcgcaggcaggtgattgaaatccgcattcgatcggtatatatgaaatgaacgaacgaaacagcggattcgtcgaggaggcgaaacaatgaaatttaccgaagcgattaagaacaaatggcaacagttcttagataaattggccggcgaaaacaagaagtccttcggggacgcgcctttggattgctgctccctgaataaaaaggaaaatcattgaaacgagcccttcggggctttttttcatggcgtttttttcggcgggaacagaattttcgcgccggaaagtccacctcctcgggaatcttttggtagaataagacagacaataatttttggaggtcgttttggaaaatacaagaaacagtaaaaagaacgcgcctttgctgctcctcatggccacggtgacgcttttggccattctctgtgagctcgtgccttccggggtcttgccgcaaatgagcgaagctttcggcgtgagcacggcaaaggccgggggtttggtagggtcttacgccatcgcctcggcgattttcggtttgcccctggtggcctttacggtgacttttgagcggcggcgccttttggtgattctcttaatgggctttgccgtggccaacggcttggtggccgtggcgccgagttatgaggcggccatggcgggacgctttttaggcggcatttgcgccggtaccctttggcccatgatcacggcttacggcatggccttggtcgacgagggcgatcaggggcgggcggtggccattatcatgtcgggcattaccgtgggcatgagcttggggctgcctttcatgacctggatcggcaccaccttcaactaccacgtgtcctttgtcgtcttggcggcggcgcctgtggccattgcggcggcgtcgcgggcgttgcttccgaaagtggaaggggaggcgcggagcaagggcaattcgcctctcgccatgcttcaaaaccgcggcgtccttttaatgattaccctcacctttttggccgtgggcgccaattacggcgtctacacctacgtcacaaacttggtggccgacgtgcattaccccggcgtggccgtggcccaacttttcttcggcgcgggatccgttttggcggtgattctttccatgctctttatcgaccgccatttgtacggcatgttcgtggccctttacctctccggtgcagccaccatggccgccttctgcttcggcggatccgtgattctctttcacgcagccttcgtcctctggggcctgggcttcggcgccatgagcagcatgtttcaaacggcgacggctcggcaggtcacagaaggcgtggccgtggccaatgccgtgcagtccatggcatttaacttcgccattatggtgggcaccacgacgggcggcctattattggaaaaagaaggcacgaaacccatcctactcgccgccatggccgtgttgctcgcgggcctcgccttggcggcaatgaacagcaagcgatttgaacgacagtaatgatgaaaggagcgaccatgttatttatccactatcctaaatgcaccacctgcaaacgagccaaaaaatggctggacgagaaaggcgtcgattacaccgagcgccacatcgtcgaagacaatcccacggcggaggaactgaaagcctggcacgaaaaaagcggcctgcccctgaagcgattcttcaataccagcggcatgaagtatcgggagctcgggctgaaagataagttgaaagatatgagcgaagaagaacaatatgcgctactgtcttccgacgggatgttggtgaagagaccccttgttatttatgatgatggggtgctcgtcgggtttaaagaaaaagaatgggaagagaagatataaatttcatttttctttttctcgcataccttttttatcattttataattatatcttcgcgattctttccgggggagggaaaaagggcgttgcgattcgcccttatccctcccccggacccccaccctttatccctaacgctttcataaagtgcggaaccctaacgggttccgattcctgttgggccgtgtcgcaaacgagagaaattgaattgggcgaagaattcttattagcgaaaaagaaacttcgtccgactcaaaatcttctttcatcgacgcggcccaatacaaatcgaagcccgtcagggcttcgcacatataaaaggcgtttgtgggtcgaaggggatggggccccggggaaggggcagagggcgaatcgcaacgccctggccccttccccgggtttcaaaatcgtgcgggaatgatattttaagcggaatagaaaacaacacgtctttcagttagctacgcatttatatgactggcggctgacttggagtccgaaagctttggaagaattaattttaagcgaagtagaaaaagaaatagaaaagcggcgcttttcccaattaaaaagaaggcacatcggtgccttcttttttaattggagttgtgcttctttaaaagctcatccttcatcttccaaagctcgggactcaaatccaccacgtattcctgcggggtgttgagtcgcttgacttcgtcccaaaggctgttcagttcgcgttgcactttttcgcgaatggcctccagggaggggctttcgtaaaccagtttgcctccgatgtaaatgtcttccaaaagggagcgcacttcgtagtttctcagtgtcttgcgcttccaggtaaagaggggatggaagatttcgtagccgtcttcggggatttcttcgccttttacggtcaagacgtcggcgattgccttgccctgatctttgtcgtagaagcggtagatgtctttgacgccgggggtggtgatttttgtcacattttcggagattttaatggtaggcttgatgacgccgttatcttccgtggccacgagtttgtacacgccaccgaagacggggtggctcttggatgtaatcagtcgctcgccgacgccgaaggaatccacttgggcgccttgcttcagcaggtcttcgatgacgtattcgtccagggagttggatgccataatggtgacatcgggaaagcctgcgtcgtctagaatttttcggcactgtttgctcaaataggcgatgtcgccggagtcgatacgaatgcctcggccttcgtggccggcttcgcggagttctttaaagacttgaatggcgttgggaaggccttgatccagcacgtcgtaggtgtcgattaagaggaagcagctgtcgggatagactttggcgtaggcgcggaaggcgtcgatttcttcgtcaaacatttgaacccagctgtgggccatggtgcccaatgcggggacgccgtagagttgttcggccaaggtgttggcgctgccgttgcatccgccgatgtaggcggcacgggcccctaaattggcgccgctgtagccttgggcgcggcgggagccgaattcggtgacggatcgtccgccggcggccttacagatgcgattggccttggtggtgattaaggtttggtggttgatggtgagaagcaccatggtttccaccaattgggcctgaatggccgggcctcttacggtgaccaagggttccgaggggaagaccacggtgccttcggggatggctcgcacgtcgcaggcaaattcgaaatgggccaggtaatctaaaaattcctcgctgaagatgcctttggaacgtaaaaaggcgatgtcttcgtcgtcgaagcttaagttttccaagtattcgatgagttgttccagcccgcttaaaataacgtagctggcatcgtccggcgcagagcggaaaaacatgtcgaagtgcacgatttcgtcttgcataccgttttcaaagtaaccgttgcccatggtgaattcatagaaatccgccaaaagggtgtagttgttctgatctgtaaatttcatagtgctctctttcttgtcattcaatagaccttttttatcattatagcacaattaggtattgcgggaggtggcaaacattttcaatcccgagaattggatccatgaagcctcaggcggcgccgtttcgtggtacaatatgtgcaactataatgaagaatgagaaggtgaatgatgttacaagtcaatgatgtaagtgtaatttttcccgataagaaattgttcgacgacgtgaatttgctctttcagcggggcaattgctacggcgtcatcggcgccaacggcgcggggaaatccacgtttttaaaaattctctccggagaaaaggagccctccacgggccacgtgtccaaggacaagaatgaacggctatcgaagttaaagcaagaccactttgcctatgaagatttcacggtgatggacacggtgattcagggcaatgaagagctttacgccattcaaaaggagaaggacgccatttacatgaagccggatttctccgacgaagacggcattcgcgccggggagctggaagctcgctttgcggaaatgaacggctacgaagcggaatccgatgcctctcgcctcttgcaggggctgggaatcgagctggaaaaacacagccagatgatgtatgagcttcgggaatcggaaaaggtgaaggtgcttttggcccaggccctcttcggcaatccggagattcttttgctggacgagcccaccaacggcctggacgtgcgtgcagtgatgtggctcgaggattttttggcggagtttgaaggcatcgtcattatcgtgagccacgaccgctatttcctgaacaatgtctgcacccatatggtggacatcgacttcggaaagatcaacatggtgacggggaactacgatttctggtacgaatccggtcagttggcggcgaagctcattaaggagcagaacaagaagaaggaagaaaagatcaaggagctgcaaaactttatcgcacgattcagcgccaacaaatccaaatcccgtcaagccacgagtcgtaaaaagctcttggataaaatcgatttaacggaaatccgcccttcttcgcggcgttatccctttgtcggctttactttgtctcgggaagtgggcaatgaaattctcaccgtggaaaatctcactgcggaactggacggcagcctcctctttaaggacctttccttccgcttggacaaggacgacaaggtggcctttatcggaaacgaagtggccattactcgcctctttgaaattttgacggaacatgtcaccgattacagcggcgaatttaaatggggccaaaccattaccatgcgctatttccccagagacaacaatgcctttttcgacggcgtggacaaaaatttaatcgactggctcagagactacagcgaagaccagtcggaaatcgtcatgcgctccctcttgggccgcatgctcttttccggggacgaggccctgaaaaaagccgaggttctttccgggggcgagcgggtacggatgatgttttccaaaatgatgatcgatcccgccaatgtattgatcttcgatcaacccaccaatcacctggatctggaaagcatcgaagcggtgaacaacgggcttatcgactttaaggggaatttgcttttcacctcccacgaccatcaatttatctcctccatcgccaatcgcatcatcgagatcaaagaagatggcagcttcagagacgccaagatgaattacgaagattacatcgcccgctacatcgccgatccgaacacaggctttaattgaattttacaaaaaacaaacaattcatggctacaatgaaaagggggtgcatgatgcacggcgtcatcgacatcggttcaaataccgtgcgcctgtcggttttccgcgtggaagacggcgtggcgcaaaatctattcaatgaaaagcaaacggtgggcctggccggctaccgaaaagacggatgcctcacagaagaggggatccgcgcgctcatcgagactttgggccacttcgcctttattttggatcagctgggagacattcgctacacccacgccatcgccacggcgtctattcgaaacatcaacaattccgacgaggtccttcgtcgggtgaaaaaggccctaaacatggacatcgaaatattaagcggcgaggaggaagcccacctggccttcgtcggcgccgcgggcaccatttccggccacaaggacggcgtcctcacagacatcggaggcggctccacggagatcgtcctctttcgcgaggggcgggtggtggattccgcctccttggacatggggtctctctccgtgtttcgcgactacgtggagggcttgtttttaaccaacgacgagcgcaaggccatggaccggcggctgaagtttttattaaacgcccaggccatggagaggggacgctacccgattctctgtgccgtcggcggcagtgcccgggcgacgcttaaaatgtacaatacccttttcgacgaacatccggacaatgacgagatgaacaccgacgatttgaagacgctgatgaagcatttgctggacattgaagacaaagaaaaaatggaaattatattaaaagtaaaagcagaccgtatccatacattgttgcccggtctttcgattctttaccgaatcgccaagtatttccacgtggaaaaaatcgccgtcgcccagacggggatccgggagggctacgtcatcagccgaatcataggaggctaataatgcacgacatttctttcactcaaaatcgcgaactatcctggctgcgctttaacgagcgggttttggacgaagcacaggacgggcaggtgccccttttggagcggatgaaatttctgtccatcttcgattccaatttagacgaattttttatggtgcgggtaggttccctcacggacctttccatgcttcaaaagcgggtcatcgacaataaatccgacatggatcaggacgaacagctcgccgccattatggagcaggtgcggatgttgtaccaaaaaaaggattacgtctacgaagagcttcgggatcagtgccgcgcccgaggctattacgccatcgaaagtgaagaaatgacggagcgcgaggaaaaaatcctcttgccttacttcgaaaacaccattagtccctatttaaattaccaaatcgtggacttaacccatccctttccccacattcccaatttaggcatcgtcatcgtctatcgcttgcggaaaaaaggcgacgacagcgtgagctccatcggcgtgattcaggtgccgcctaatttaaatcgaatcattcggttggataaaaataaatacattctcctggaaaaggtcatcgaaaaatacggggccatgctctttgaatcctatagcgtcgaagacagctacctgatgagcgtgacgcgaaacgcggacatcgaatgggacgacgaggattacgaattcgccgaagactatcgttcccatatgaagaagatgctgaaaaaaagaaagcgcctcatgcccgtgcgcgtggagctcgaccgcatgccgccgaaagaggtgctgaataagcttttaaacaagctcgccctcgacgaaagccgggtcttcgtcacggcgagcccggtgcgcttgggctatctcttcggcgtcgtggaggaactggcgccctctatggggccggagagcgtggatccgcccttcgagccgaaaaacagccgctacgtggacgaaaagaaacccatgatggcgcagatcgaagacagagacattttgctttcttatccctacgaatccatggatcccatcattcgcctcttggacgaggcggccaaggatcccacggtggtctccataaaaatcaccttgtaccgcatcgcaaaaaattccatggtggcggaaaaactcataaaggcggcggaaaacggcaaagatgtcttggtcctcatggaactcagggcccgattcgacgaagaaaacaatattctctggtcggcgaatttggaaaatgccggctgtcgggtgatctacggcttcaacaaatttaaatgccactcgaaagtgctcttaatcacccgcgtcgtggacaacaagcccgtctacatggcgcaaatcgccacgggcaattacaacgaaaagacggcgaagctctacacggatttcgccctcatgaccgcccatcagggcatcggccgagacgtgaatcgcctcttcgacaatttcctcatcggggaattagagggaagctacgattatttgtgggtgagcccgaaaaccttgcctgaaggggtggaggcggccattgacaaagaaatcgacaaggtgaaggccggcggcgagggctatgtgcggttgaagatgaattccatctccgacagagaaatgatcgacaagatctccgaagcttccaatgccggggtcactgtggagatgatggttcggggaatcagctgcatcgtgccgaaaattcccgagcgcacggaaaacctctccgtctattccctggtgggccgctttttggaacaccaccgcatctaccaattcggtcgcggcgaggcggcggaggtgtatatttcctcggcggacttcatgacgcggaatctgagaaagcgcgtggaagtggcggcgcccatcctggatccggacattaaaaagcggattctggactttatggacattctatttaaagacgatgtgaagcgcagggagcttttgccttcgaagcgctacgcccatgtggaaaacaaggaaaactttattgcgcaaaactacttaatcgaagaagccgatcgcttcgcaaaggacgcagggtcgaaggagaaggacagcgtcgtgataaaaagcgaagagaaaaaggcgccgggatttttcgcccgactgaagaaaaagctcttcggctaaaaaaatgaagggaatcgacagggagacctgtcgatttttttgtgggacaaaaggaaaacttccatcgccgaccttatggaaaatctttgatataataggggcagaaagggggagaaggatgaaagcgaataacgagacgatgtattatgccttcgtcgagacgccggcgggcgtcatgaaaatcgaagccacagatcgcaccatccgctctctgacatttgtggaggatatgggtgcttcccatccaaatgttttgtgcgaaaaggccgccgcggcccttcatgattatttttcgggaaagggaagatccttcgatctgccccttgaaaaagcggcctcgccctttgcggagaaagtctacgaagcgacgaaaaacatccccttcggcgaggtgctcagctacggagaaatcgctcgggccgtgggatctcccggtgccgtccgggccgtgggccgcgccctggcaaaaaatccccacatgatcgtcgttccctgtcatcgcgtcgtctacgaagacggcaccgtcggccactacgccggcggcgacgagaaaaaacgcaccttactggcctttgaaagaggtgtgtcgtgaatcagctcctgctttttgtctccgtggtatttattttggccctcatggccattcgcttttctcataaatacggcatccccgccctcttattgtttttcgtcttagggatcggagcgagccgcgcggggcttcatttcgataattacgactttatggagcaatacgcctccttcgctttgtttatcattatgttttacgggggctatggcacgaaacttgaaatgggcttgcccgtcttaaagcccgccgtctttttaagcgccttgggcgtcgtgataacggcggcggtaacggggcttttcgtccactacgtgctgaaatttcccatgatcgaatccatgctctttggctccgtggtcggttccaccgactacgcctccgtctcctccgtcttgcagagtaaaaatctgaatctgaagtaccgctcggcgccccttttggaactggaaagcggctccaacgacccgacggcctacaccatgaccatgatctttttgagcatccttctgggttcggatctttccattcccctgttggttgctaagcaaatcggcttcgcccttctcatcggctttctcatgacgcgggtgtttttctttattacggagcacgtgaatttcagaaaagaagggctctttaccatctacgtcttcgccatggccatgggtacttacgcccttaccggcgtcctcgacggcaacggctacctggccgtgtacctcttcggcatcatcgtgggcaatcaggaatacatgggcaagcgggagctggtctttttcttcgacggcctcacggaaattatgcagatcagcctcttctttctcatcggctttctttcccatctgccggccctcatccactggttgcccatgggcatcgtcgtcaccctctttatgctctttgtagctcgccccgtggccgtcttcggcattatgggcttttttgaatccacggtgaagcaaaaagtggtgctttgctgggcggggcttcgcggcgcggcggccattgcctttgccatcatggtcattaacagcggcgcgcccctggaaggggatctctttcacatcgtctttgccgtgtgcatcgcctccagcttgatccagggctccctactgccctgggtggtgaagaaaatggacatgctggatcccaacgacacggtgcttaaaacatttaactactatcaagaccgaagcgacgtgggctttttggaaacccgtgtctacgacgaggccttaatcggcacgccggtaaaggatttaaacctgaccttcgactttatcgtggcgaaactggtaaggggcggcaagaccatcgtcccccgcggcgacacgattctcgaaaagggcgatgtggtggtcatcggcggcaagagccacttcgacgaagtgggaggcaatttggaagaattcaccattcgcaagaaccacccctggcaaggcaagcgcattatggacatccattttaagccgacggagctcatccttatcgtgcagcgggatcaaaacattctcgttcccacgggccaaaccgtgctttgtgccggggacacggtaatctttacagacaacgaagatgaattttacgacgaagaaaaggaggcgggagaaaatgcctctcaggaaagtgaagggaagtaagggcatcctaaaaagaatgtaaatagcccttgacagaaaaaccaacctcacctataattatataggtattgaggtgctatcgtagctcagccggtagagcactacattggtaatgtagaggtcgcaggttcaagtcccgtcgatagctccattaaaaagaaggtcgccaataggcggtctttttttgtgccctttttcgggcaaataaaaaaactgcggcgtgcctgaccgcagtttttttatgggaacaattaattttcgtagacgtaaaagaggtcgccttcctttttttccacaaggtaaagggcgtcttttaccacataggtatccgagaggtagtcgccgaggttgcgctttctttcggaaaaggcggtgatgacgtagaggaggacgaaggtggtttgaatcagtcggcagaagccttctcgaatcaccacggtggtcaaggaaaggcgatcctcttcgggatgaatgacgcgaatggcggtgatgattttgcccaggctttggccgttggtgaaataggtggagagaataaagtagaggtagaagaagaagccgctgatggctttggccgccaagccaccctccgtcaaaagaagggcgttaatcggcgatgcgaaaatggcggcaaaggcgctcgccacggcggcatcgattaaaaaggccacggtgcgaatccaaaagcccgcaaccaccatggcggagacgggatggctgtagcggcgtcgcgggggcttgggattatgagcctgcgtcgcctcaaagccttgggtggcagttttgctttcctcgcccatcgaaagggcttcagccttaggtgcttcttcgacttccctttggatgttcgcttcattagcgtgcacatccgaagtctcgttctgtaagttttcgtttagcgcctcggccaaggctttggcgttgttttctttcgtttctgcggcctcttcatttcggtgaaagaggccttttttcttttcggtgaagggatcgtagtgttgatcgttcattattcacctccgtagaggtacatggggcggtcattgtctgccaaagcgccgagaacgagtttggcggccacttctttatccgatgctttttggctgaaaagggaggagaagaagccgtcgcccagccccttggtgtagttaaagacttcggggttgtcgcatttaatggcctttttcaaggcggcaagggcgtcttccgaatagcccaattcgtccaccaggcccttttgcttggcctgcttgcccgtaaagacagatccgtcggccaaggggcgcagggtggccatgtccatgtggcggccctgggagaccacgttcagaaattcgccgtagagatcgtcgacgacgccttgtaaaatggcccgttcttcttcggtcatggggcgggtgttactgccgatgtctttgtgggcggcgctttttatggtttgattggcgatgcctaatttatccatgaggcccgaaagattggtgccacccataatgacgccgatggagccggtgagggtggagggggcggcgtaaattttcgtcgccggcgcggagatgtaatagccgccgctggccgccgtgttgcccatggccacgtaaacgggctttttcccatcgacaatggctttgatccgcttgtggagctcggcgctttcgtagacgccgccgccgggggaattgaccttcagaagcacgcccttaatggtgtcgtcttttaacacctcgtccagcgcgtttaatgtggcctgatgatcgtagcctttggtgagaaaagaggcttggggcgtgttcataatggcgccttccacagtgatgacggcaatacgattttgcgcgtcgccttcttctaccacttcctcgttcatgccgttgacggtgttcataaaggacgcttccatttttttcatgcgggcttcgctgttgatcttgtcgctgattccgcttgagatggcactgatgcctaagatcaacacggcgacaccgacggcgacccaccgccgcgtgttcattttttccagcataattcctccttattgctacaattgtttttcgtattatagtatgatatgcgtagtacgattgcgtacaaaaaaataatatcacaggagcgtagtatgcacaattgtccgtggaaaattgcgtttctcctgcttttggcgatcaatcttatccttctcatcggcctgtttattttgtctcggcccgaggatatgccacaagaggaagaaacggcgaatatagaaaaatccaattacgaaatcaccttgacgaaagaggcgttggaaaatgccctgcgccggggattgaaagaaagcggaagcgacgcccgcttttccattgccgacggattttatttccgcattcccgtggatgcttacggcatccggagcgagctggtattaaagacgcggcccttggcctataaagacggcaccgtgcacatgaagcttgagcgtttaaatttcgggcacctgcctttgcccgaaggggcagccctttccatggcggcgtcggccgtggatgttcgcggactcacgcttgtgccgtcgcagagagaaatcgtcttggaccccaacgcctttatgccggagcatgtgggcacctttcgggccaagttactggatgtagacaatcaccgctatgtatttgaaggaaatttgggagcaaattaaatggatgatgtttggttttatataccgattgtggtgattctcattgccctctccggctttttctcctcgtcggagacggcgctgacctcggtgaatcaaattcgcctgaggcggcgggccgcggagggggacaaaaagagcatgaccgtcttgaagcttctcgaaaagccccaagatgtcatctccagtattttaatcggaaacaacattgtgaacatcgcctcctcggcggtggccaccgtgttttttacgcagcttttcggcgccagcggcccggtggtggccacggtggtcatgacgatttttgtcttgatcttcggggaagtgttgccgaaaaccgccgcccaacaacagccggaaatgatcagccgaaaagtggcgaagcccatttccgggatcacgaagctctttaagccgttggtctttttcctcacggctctttcgggtttggtgacgaaatggcttttctcccacgtagacgaagcccccaccattactgaagaagaatttaaagccttggtggaagtgggagaagaagaaggggtgctgcagcgggaagagcgggcctacatcgacaatgtgctggacttctcttcggctacggcatcggacatgatgaagcctcgcacctccgtggtggccctggatgtggaggccacggaagaggaaatttttgatctcttaaaagacaatcgctacagccgcatccccgtttacgaggattccatcgaccacattatcggcatcttgtacatgaaagatgtggtgcgcctcttagcacaaggggagaccattcgcctgagagaaatcctgcgggatccttattttatcggggaaagtgccgtggcggatcgcattttccgcgagcttaaggcgagaaatctctccatcgccgtggtggtagacgagtacgccggcaccagcggcatcattaccatggaagatattttggaagagctcgtaggcaatatcgacgacgagtacgatttggaaaacaccgccgtgatttttttggaaagcggcgtgtacttagtggatcctgaacttcggatcgacgagatcaacgattacttccacatgaatttggaaagcgaaaagtccgattccatcggcggctttgtcatcgagcttttggaccgcattcccaagcagggcgatgtggtgcgctacggcgacattctctttacggtcaatgaaatgcagggcctgaagatgacgaagctgaaaatggatctgagaccggaggcgcagcccctttaatgtgaggaaattatgctggataaaatgattcaaaaaaaatttccggatccgaaagatcctgccgggcgcagcgccatgggcagagaagcggcggtaatgggcattgtgctgaactttattttcgctctgtcgaaaatcgtcatcggcaccttggccggcgccatttccatgatcgccgacggtttaaacaacaccatggacttaatgagctcggtcatcgccctcggaggctttcacttcgccgccttgccggcggacaggcgccacccctacggccacgctcgcatggagtatttggcctcttttctcgtgagcctgattattatttggaccgggctcagccttttgtgggaatcggcaaagaccattatccatcccgatgccatggaaacatcggccctggccgtcggcgtcctcatcgcttccatggcggggaaggtatttttgtatcgctacaatgtggttctcggcgaggccatggattcggagcttttaatcgccacgggctacgacgccagaggcgacgtgttcgccacagcggcggttcttttctccctcctggtcaaccaactcttttccctgaacatcgacggatggatgggcctcgttgtggcgggaatcattttaaaaagcggctgggaaagcttaatggagacggtggattcccttttgggtggaaaaaccgatccggaactggtccgcgccattatgaaagacattaaaagctacccggtggctttaggcgtgcacgacatgatgtatcacgattacggcgccaacaaacaattcctcacccttcacgtggaggtcaacagcgaagatgatgtgatgaaaattcatcaggacatcgacgaaatcgagcggaacattgcggcgaaataccacatggatacgacgatccacatcgatcccattcgcatcgacgacccgaggagcaacgccctttacgattacgtgaagaaaaagctaaaggaagtggatccccgcttggatatgcacgattttcgcatcgtcactcgtaaggacgggctgaaattaattttcgacgtgctttttcccatggatttagagggcaaggccaaggacatcgacgccgaattaaagtggaaggtggaaaaagaccacccggaatacgctctgattacgacctacgacatcgattttcagaatttattgggagcgaaagatgaataggcttttatcgccggaggcaaaagaaagccttctggctgcatggaacaaagaacagggcctttccggaaacgccctgaagatgatcgcctgcgtgtttatgtttttcgaccacatgagccagggcgtggcattaaacagcctgggctttacgccggcctatgtggtgaacgattgggggattcccgttctctcgggcctttccacggcggggcttctcgccatggtggccaccctggcaggccgcatcgcctttccaattttttgcttcttcctcgtccagggtattttgctcagcggggactggaaaaaacaaattcagcggctggtgatcttcgctttcatcgccgaagtgcccttcgacctgggcctcttcggtcaagctttttattgggatcaccaaaatgtgctctttgaattggccgtgggggctgtgaccatcgtcgggatgaagaaaatcctcgacggagacaaaaaggggaagaaagcctacgctgtcttcctttttatcgccacggccctcatcgcggaatttttgaaattcgactacggctccgtgggcatcatcgccatggtcttattttatttggcgtgcaacgatcgccgccgcaccatggtgatgggcattttcgcttttctcttcgaagcgcccctttacggcacggtgtatttgtccctgcccttgatctatcaatacaatggcaagcggggcaggggcggccgctggttcttctacattttctatcccgcccacttactggtcctctatattatttctctgattatttaaaaccgacagaaaggcgtgttatgacattttcctcgaaagtgaactccatcaaaccctactttgcctcctaccgaggcattttatttaccgatcttctttgcgccggactcaccaccgtatcggaaattattttgccggtgatcctgcgctacttaaccaatctcggcgtgaaagacattcgtctcattacaccccatgtcatcgcccgactggcccttttgtttttcgtcattaaggccgtggaaatccttgccgcctactacatgaccaacatcggccacatgatgggggcaaacatcgaaaaagacatgcgccgggacgtgtacaatcacctgcagaccttaagcgcctctttctacaacgacacccaagttggccagatcatgagccgtattaccaacgacctcttcgacattacggaattttcccaccatgcgccggaagaatactttatcttcgtggtgaaagtcatcaccaccttcgtgatcctcgtgtccattcacgtgaagctcaccttggtgctctatttgatgattcccattatgctcgtggcggcacggaaatttcgcttgcgcatgctcgtggcccagcggaaacagcgggccatgatgggggatttaaacgccaccatcgaagattccatctccggcattcgcgtcacgaaatccttcgccaacgaagacatggaaaaggcccgcttcgacgacgaaaacacccgctttttggaaaccaagcgggaatactacaaggccatggcgggctttaatgccgtcaccagaaacttcgacggcatcatgtatctcatcgtcatcatcgccggaggcggctacatgatggcgggagacattcttcccggagatatggtggcctacattatgtacgttaccaccatggtggccacggtgcggcgcatcatcgacttcaccgaaaccttccaaaaaggccttaccggcatcgagcgcttcaacgaaatcatggccacagaaagcgacgttcgggaaaaagaagacgccgtggatctcgtaaatgcccagggcgccatcgccttcgaccacgtggacttttcctacgaaggcaaatacaaggtgctggatgattttcatctgaccattcggccgggagagaaagtggccctggtggggccctccggcgcagggaagaccaccatctgcaacctcattcctcgcttctgggatgtggatcgcggcgccgtcatggtagacggccacgacgtgcgggacctcaccttggagagcttgagaaaaaccatcggcatggtacaacaagatgtgtacctctttaacaccaatgtcatggaaaacattcgctacggccgcccggaagccaccgacgaggaagtcatggacgcggcgaaattggccaatgcctacgacttcatcatggatctggaaaaaggctttaaaacccacgtaggtgagcggggcgtgaagctatccggcggacagaaacagcggatctccatcgcccgggtctttttgaaaaaccccgctattttaattttagacgaagccacctcggccctggacaacgaaagcgaaatgattatccaacactccctggaagccctcaccgaaggccgcacctccattaccatcgcccaccggctctccaccgtggaaaatgccgatacgattttggttatggaaaaagacaagggcattgtggagcgggggaatcacaaagagctcatggccaagggcggcttgtactaccacctctacaccaaaggcggcgatttggtagaaaacttcgatgcgacaaactgacgagagactcggcatgtgccgggtcttttttcacgagcgattgacagaaagagaaaaaaacgataggctagaagacacccatggggacgaaatggcttcgacggggattcggaacccggggtagcaagccgttgatgagtcaggcaacgtaaaaatgactcaaaaaattaaatgctaacgaaaacaacgtagcactggcagcgtaaattacgctacccacggaactaagaggaccacggcttagggaagtgtcaaatcagtggtgaaacgtcatcggtcaagctttgccccgatgccggaatttatgaagctaccttaatgcgaccttttgtttttcttttcgccttaagggaaatctaaagaaaaactgagcttggagaaacctcggtggaagaattttcggacgcgggttcgacccccgccgtctccaccaaataaggaagcatattttgatagaaaaaagtgcttcctttttcattgccgaaaagctttgatatcaagggatttaagcattttaaggcataaagcagcccgtcccggagttgattccgggacgggttttcttgtgcgctttagcatgaataaaccaccagctatgctggtggtaggcataaaaagctttagcttcaagtaaaaaaagaacctcctatgataaaattatggctctataatatccgttggggagtaacctcctcaatggatatttttatgcaaaaagatagcacttgttttccctatcacctaaaattatatcaccacaaaataataaaggggggcaaacaagtgcaaaacaatattaccacattacttttaggaatccaagatgtcgaggtcaccggtgtttcagaagaaagacgcctgattaccattgattgcaa

SEQ ID NO: 45 - DNA, 29094 bp, Peptoniphilus rachelemmaiella
  source 1..29094: mol_type = genomic DNA
cattcatgggctttctaaaaggtaagagcagtatcatgatctatgaacgatggggagacatgaaatttaaatataggggaaggcagttttggtgccgaggctattacgtcgatacagcgggaaaaaacgctaaaaagattcaggaatacattcaaaatcagctgaaagaagatcaaataagtgagcaactaaccttcgacacgacgaaccccttcaaggggtagccgagtaacgttagcacgggcagaccaccgacgcccttcaggcgcagctagtaatgcaggccctttgggccgaaaaaggaaaacccccggctacgccgggggatgtttattttgcgtgaatcttcgggacgcgaaatgaatgggaagggaaagcgccgattcgggcaacaaaaaaagcgggggtctcccgcttttttcagtgcttttgaaaaatggcgttggccacgcgaatcatttccttggccagctcgtaattgtcgccgattaaatcgtagacggcatcttctgtgagcacgccgcagtccacggtgatctcccctttgtcgaaagcgtctacgtcgtcaaaccaatcgtgggagctgtaataagcatccagcttgtcgtaggctacctgggctttttcgaaggcggccagcgcctcccgaaaggcctttacggcgtcagtgtgctcctttaaaatggcctccatctcggccacgcgcttgtttcgatccatggcatctcctttcatgaaaaaagcaccgaagccgtggcttgggtgcttggtttcaagtgtattttaataggtttcgacgaagagttcaaaccatttttgcgggtggaagcaagcggggcatttttccggggcttctttgccttcgtgaatgtagccgcagttgttgcatttccagagcacaacttcgtcgcgcttaaagagcttgtcttctttaacattttccaacagcttcaggaagcgattgcggtgggcttcttccacttcggcgatttcaatccagttgtcggcgatgtcgtcgaagccttcttcgcgggcgatttccgcaaatttgggatacatgtcggtggcttcgccgtcttccccttcagcggcgtgtttcaggtttaattccgtgctgcctaaagccacggggtaatcccattttacttccagttcttcttcgttgaagtcgtcgagcaagtatttaaagaagcgcttaccgtgttcttcttcgttgcgtgcggtttccaagaagatgtttttaatttgaacggaagcatctttgtctgcttgtttggcgtacatggtgtagcgtgccgtggcttgagattctcctgcgaaagagatcaaaagattgttggcagttttagttccttttaatgacataaaatcctcctattttcctataatacatgcggttgcccccagtatacctcaatatcaggataggttcaaccgcccgaagcgtgttatactgtagataagacaatgcataccgaacaacaaaggagacgatcatgcgaattttatgtgcgggcccgacgacgctattgccggaagtggaagcggccatgacggaagtggtaaccaatccggatttggatccggcctacgaagtgtttcaccggaatgtggagaagcggctttccgccgtggtaaagaccacccgccccacggtgattatgttaggcgaagggatgctcgccctcgaggccgccgtctgctccttaatggagccgggggaacgggtgctggttatgagtaacggcgtcttcggcggcggctttgccgattacgtgaactttttcggcggggaagccgtgctttacgaaaaggatcatcgccggggcttcgacttggatgaattaaaggcctttttggaaaaggattccgatttcgccatggccaccatggtccactgcgaaaccccttccggcctgaccaacgacgtgaaggccatttgcaatctcttaaaagactacggcatcttatccattgcggactgcgtgtcctccttcggcggcgaagacatcgacttcgatgcgtacggcgtggacatgatgctttccgccacgcaaaaatgcctctccgcccccacgggcctttccatgattaccatttccgaagcggcggaagaaaagatgaaaagtcgcaaggcgcccatccccagctactacatgaatgtcttaaactacatgagcggtcaggaagatttcgccttcccctacaccatgagcgaacacttaaccggcgctttgaacaaggccctggatctgtgggagagaagggacagcgtgaatctgcacagaacctacggcaaaatgacccgggaacttttcgtgaaggaaggcttcgagctctacccgaaggattcctttgccgatacggtgaccgccgtgtgtctgcccgaggggatttccgccacggaatttctcgccaagtgtcgtgagcggggcgtgtttatctccaaaggcgccggcaagcttcacgaccgcatcattcgcatcggccacatgggggcgaatatttctaaggacaattttgccgccctctttaaggtgctggatgaagtcttcgcaagctacggcattaagacccgcttcgccgaaggttttgccgcctacgagcttgactaaagctatgttataataaagccgagggggtgtttccatgaaaggattatttgtcgtcatcgaaggaccggacggatcgggcaaatccaccgtggccgaaggcatctgccgccatttcaaagaaaagggcgtagcggtgctccacacgcgggaacctggcggcacggccatctccgaagccgtgcgtgggattctcctggatcccgaaaacaaagccatgcacccgcgctgcgaggccctgctttatgccgcggcccgggcacaacacgtggaggaagtgatccgccctgccttggccgaaggggccttggtggtgtcggagcgctacgtcttctcgagcctcgtctatcaggggctgtgccggcaattgggcctttcgcccattgaagccattaacgccttcgccaccgacgacctcaaagcagacatcaccctatacctggacgtgcccgagggcacgggcaaaacacgcatgaaagaacgtctcgccgatcgcctggaatccgacgaaaaggtcatggacacggtggagacctattatagaatcttggccgagcggcgcaaagaagacctgagccttatcgacgcatccgccgcggcggatcaggtgcttaagcgctgcatcgaagccattgaaaaggagtaccggattaaatgaaactaatatttgccattgtgcaggatcaagacgcccccggtttaatcgacgcattgaccgaaaagcgcttccgcgtcacgaaattatcttcttccgggggctttttaaaggccggcaacaccacccttttaatgggcgtggaagaaaaagacatggatgagctcttcgacattatggaagccaattgctccgtcagagaagagcccacctccatggtatccatgtcgcccggggaatcctttatgccctatcctttaaatgtgcgcgtcgggggcgccaccatcttcattctcgatgtggcagaatacaatcgttattaagggggcgcagcatggataaaatggtggttgcgattattgccgaccgctttgtcggcgatgtcatcgacgaattgcttgaggcggatatttccgtcacggaaatggcctccaccggcggcttcatgaaagagggcaacacgacggtggtcatcggcgtcaccgacagtcagtacgaaaaattaaaagccatcttcgacaaggtcgtaggcaaacacagcgggcgagacgaaatccacgccggagcccacgtctttgccatcgatttaattaagggcatccacatttgacagcggatctcgtaaagtccggtttacacgcctacattttaaaaggcgacggggaggcggcccttcaggcggcgcgcagcctggccatgggctatttgtgcaccggcgaggaggcgccctgcgaccattgttcttcctgcaagctctttttatccggcgaagggcgaggggagaatcatccggactatgtggaaatcgccccgacgaaaaaaaccgccaaggcatccataaaaaaggagcgcatcgaaggggtgctgaaggcggctgccatgacggattacggcggcggaggcaaggtctttgtctttgtggacttcgacaccaccaccgtcgaggggcaaaacgccctgttaaaggtgctggaagagccaccggcgaagacccgctttctccttttaactgcgtcgccggagaaaattctgcctacggtgcgctcccgagcgggctttttggatttaaaaagcggcggggccatctccgatcccgagcggcgccaccgcatctatcgcctcatcgagaaagttttgtccgggcaggaggaagcttttttggcgcgcagttttttcgacgaggagaaagagcatttgagcgaaattttcgacgaaatgctcgcctattttcgggacatggccgtttattacgaaaccggcgatgaacatgcaatcaagaacaaagattatcgcgtgcccatcgcccgccagtccgaggcggtggggatgcgggtctatgagatcatcgatgccatttaccgagcgcggcgctatgtggagatgaatgtaaacaaaagctttgcctttgaatggctgcttataacaattggaggctagtggattttgacagagacgagagatgtagtcggcgtgcgatttaagcgccgcggaaaaatttattatttcgatcccaaagacaccgctcccgttcaagacggcggcgtcattgtggaaacggcgcgaggcgtggaatacggctacgtggccattgagcgcaaggccgtggccgccgacgatattgtaggcgagctgaaacctattttgcgcatggccacggaagaagacgatgcgcgccaccgatccaaccgcaatctggctcgggaggccatggtggtctgcgaggaaaaaattaaagaacacggcctgaaaatgcgcctcatcagcgcggagtacaccttcgacaattccaagctgctcttttacttcaccgccgaaggccgggtggactttcgccgcctggtgcgggatttggcggctattttccgcacccgcatcgagctgagacaaatcggcgtgagagacgaggccaagcttttaggcggcatcggcatttgcggcagagagtgctgctgcgcctcctttttgggagacttttcgccggtatccattaacatggccaaggatcagggcctttccttaaatcccgacgccatcagcggtgtctgcggcaggcttttgtgctgtttaagatacgagcagccgggctacgaagagaatttaaaaatcatgcctcgggtgggacgcgtggtctacacctccgagggcaagggcgtggtcgtggccaccaataccttagaggccttggtgaaggtaaaaatcgaaaccgacgacggcgtggagtttgtcgtgattcccgccgcggatctggcgagaaagccttgccggggaaaggggtgtgcccatgaaggggacatggaagaagctgaataaaggcgcctttaacggtgggcgacttctgtggctcgcaggctttctggcgctctttttcctggacgaattccccggcttctactttcagacaaagattccccacgctgtggccgacgtggttttgtgggggatctatttttgtgcccttttaggggcgatcctgctggtcaaaaatttcgcctcaagcatcctcaccccggcggcgacggagatgctcctcttaggcgccctggcctatgaggtagaagacgtgctcagcgccaccgcctccctgggtcccgcctccgacacctacatcaccaccgccacggccgccgtggtggcggtaatctggctcttcgcccttggcgttggggcgcggaagctttacccggcggccactgcaggaggggcgatccttatggccgggctcatctttttctgcgcgtggtccggccccaagacaagacccgacgtggcggaggcgaagaaaagcatccccgcacgctacgaggtggaaaaaattacttacggccctggccgcagctacgactacggagaagaaaactacgccgcctacctgcgcctgcccaaacatcaagaccggttgcggaagctctttttcggctacacccctgcccacgtgccctacgaaggggatctctatttacctgtcggggcgaagaacgtgcccctcgtcgtcttcgttcacggcaatcacaacatgatcgaggacaacaaagggggctacgactacctgggccgctacttggcggcgcgtggcgtggcctttcaatccgtggagcagtcccactttaacgcctatttaggcaaaggcctttccggcgaaaacgacgctcgggccctgagccttttggatcacgccgacaaaatcttgagtgacccccgcttcaagggccgcatcgataaaaaacgcctctacttcggcggccacagtcgcggcggcgaagcggcggcggtggcggcatccttcgcccaattgccctacaatcccgacacgggcacggccacgaaaaacatgaaagtggcaggcgtcctgtccgtggcgccgacagacagccagtacgagcccggcgatcgcccggtggaactgaaagtgccctacttcctcgtggccggggcgtgggatcaagacgtggcttccctagaaggcatggatcaataccgccgcgcaggtgcctggcggggccagctcctcgtggactacgccaatcacagccaatttaattccaattggggcaggttggatcgggaaggcctccaggccctggcattggccacgggcaatgtgttggacaagaaagaccaacagcactttttagaagtggcggcctatgcctttgtaaaagaccggagactgtttcatgacataaaagactacctgccgcaatcgggctttgccctggccacccagccgaagagctgcgtcctcgccgacttcgaagaagatgccgatctcaccaccgccaccgccgctacgccggacataaaaggcgccaccacctatcaggaaggggccttcgccccctcgggccgcggcggaaacaaccacgtcgcccgactcatcggcacctacgccctgaacatcgacgaagcggcggaaggggacttcgccctggatgtggcagcaaaaagtggccgagccgatgtaaagatcaccttaatcgacgcagccggggagaaagtggacttttcgcctgaaaaagacagcttgcacgccgccgtggaaacgggcctcttgaaatggcagtacgcggcgaaaaagtgggaatacaagcgggctttggaaacggtgcgcctcacaaaagaagccatggcgaaaaaaaatcccgcctttcgcctaaatacactgcgtcgcgtggaaattaccgcaaaaggtcttacggaaatcgacaatattcgcatcgaaaccgattaaaagtgaatccctcgggtataagtaaagcgaacagagttcggggggttacgttcatgcacgatacactattaattaaaacaatcaacagagaacaagccggttttcggaatatctttttccaaatcggcgatatggatgcgcacatcggcgagctcatggacctactaaataagcctgacagcccctatgccgggcgttgtctgtttcgctacaacggtattcgtcttagattggaagtcgaagaaatccccactgtcctggcgcgcctcgtagaaaaaggcgtaccggtgtatggcgtttatgaaccgtacttttaggagtaaggttaggaggaatgttatgtccaacgaattaagcaaaaaactgaacgaacaacttaactttgaaattgaatcggcctacatctacatgtccatggccaactgcatggacagccaaggcatgtccggtttcaaccacttcttcgtacaacaagccaaagaagaattggaacacgcaagagaattctatgatttccttcaagaaaccgactgtgtaccggaatacgaagccatttcaaagccgccgaaggaattcggtaacttcaccgacaccttccgtgccgcttacgaacacgaacaagaagttacccgccgcatcaaggccatctacaaagaagccatcgaagtgggctgcttgaatacccaacaattcctcgataaattcatcgcagaacaacgtgaagaagaagacaccttccgcaacatcgtcgaacgcttggaacgcatcaacgaatcctggaacggcctctacatcttcgaccacgaattggctcaaagataagcaaaaaattatccctcaccatggcggtgggggattttttattgggaaaatttacggggatcagtcgcctttttcatgcccgttaaagaaatcgtcgacggccttcaccaaagcctcgttggattccggatccaaaaggcagaagcggaagaagcgttcgtctaaatttttaaaattggcgcagtcgcgaatcaccattttcttcgcgagaagagcttcgcgaagttccgccgctgtgtgcacaccgtctttaatcttcaccaagacgaaattgccgtaggagggaaacacctttagggcctcgttggcctctaaagcggcgatgaccttccccttctcccgctgaatcaggcggaagctttcctcgcgaaaagccacatcctgaaacatgacccggcccataatatcggccatggcattgatcccccacatggaaagattctcggcaagggcagcgtgaagggcctcatccccggtcacggcgtagcccaggcgaatccccggcgtggcgaaaaatttgctcgtgccgcggatcacgatgagcttttcgcggcttctgattaaagacacggcggagtaaatggcgggatccgtaaactcgatgtaggtttcatcgaccaagacataggcgtcggtttcgtctaaaatccgcgccacatccgcccgagtcaaaatggagcccgtggggttgttgggattggtgagcacgtaaagatccacggcctcgctacgaatttgggcgatgatttcgtccacgcccggaacgaaatttttgtggtaatccaagtggtattcaaaaatctccgccccgattttctccagctcccgggcgtactcgctgtagcaagggctgttaatcagcgcccgggcgggctttatgtgggcaatggcctcttgaatcagctgcgacgtgccgcttcctaaaagcacggcctccggggcaaccttgagataatcggccatggccgccttcagcttccgatactccggatccgggtagcgacacagggcacgaatgtttttcgccgccgcctccatggctttcggcgaagggcccaggggattgatgttcgacgaaaaatcccgtatctcctccgggcgatagtggtattttgtttccagggcgtaaagatcggcgccgtggcgagtctttttcatagaaaccttcctttcgtgcctatgatataatgacaaaaacaaaaagacaatgaaaaaggggtgcttatgtttaatttcagaaacgattaccacgatttatgccatccgaaggtccttcaagccctggccgccaccgacggcgagggaaatgccggctacggcttcgatccccacacggagcgggccattcgcctgattcaagaagccaccggcggcgattaccccgtccacttcgtccacggcggcacggcggccaatcttttggccctcaccttccatttgcgtccccacgaagccatcgtcagcgccgatctgggccacgtggtgggccacgaagtaggcgccatggaagcggcgggccacaaagtggtcaccgtaaacaccgaagccggaaaatacgatcccgaggtgctggatgcattcatcgcatccttcggcgatttccacaatgttctccccggcatcatctatctttcaaacaccacggaaaccggcctcgtctaccgaaaagaagagctcgccgccattaaaaaagtggcggataaatattctcttcccgtctacattgacggcgcccgcatggccagcgccctcacaagcgaggtcaatgacgtgaagctttccgaatacatggactacgccgacatcttttccatcggcggcacgaaaaacggcgccctcttcggcgaagccctggtctttaaaaacgacgacctggcacgggaatttatctacttccaaaaacaacgggccctacttatggccaagggctttaccctgggcacccaatacgaagccctcttcaccgacgacctttatttcgaaaacggccgcaccgccaacttggccgcaagctacctggcgcgggaacttgactacctgggcgtggaatttatctatccccccgagagcaatcaattatttattcgcctgccgaaagctgtggctgacgaactggaaaaacacggacaattcgatcgtatgggcccgaaagaagcgggcacggtgcctgtgcgcttcgttaccgattacaacacgacgaaagatgaaatcgacggcgccgtcagaatcctcgaaggccttttaaacgaagcccgataggggagaagttaaatcagagtaaattggtttgacaaggcgaaagtgccgtggtatgataagaaaaaatcaaaaggagaaaccatgaacaccttattccaaagcatctgcaaatgtgcttgttcctgtacttgttgttgtacgggttatttgcctgcgcagatgttgggaaaagacatgggcttgtcctgattgttattttccataggcatcttgaagcgggcttcggctcgctttttttaattgcctgaaaggagtacttatgaaccgagattttctcgtggccatgttgccccactacgtcgaggcggcgaaactcaccctcacaatcgggctcatcggcgtggcggcatcggccctcgtggggttcatcctcgccttgattcgcgtggaaaaaatccccgtgctaaacggcctcgccaaggcgtacatcgaaatctccagaaacacccccttgttgattcaactgttttttctctacttcggcctgccgaaaatcggcatcgtcctctcctccgaagcctgcgccgtggcggggctgatctttctcggggcaagctacatggccgaatcctttcgctccggcatcgaagccgtggataagcgacaaatcgaagcggccatggccatcggcctcaccaaaggccaacgcatccgctacgtcgtcctgccacaggcactggccgtggccatgccatccatcggcgccaacactatttttcttctgaaagaaacctccgtcttcagcgccgtggcactggcggatctcatgtatgtggcgaaagacttaatcggcctctattacgaaaccgacgaagccctccttctcttggtgatgagctacctgattattttggttcccgtcgccctgatctttagcttactggaaaggagaatgcgacgtggcatcggcacaagcgctcttgcttaatccccataccatggcgaggcttctaaaaggcctatgggtcaccatggaagtctccctcatctccgtggccctctccatcctctttggcctcgtcttcggctgggtcatgacgaaaaaatccccggtcatcaaaatcctttcgaaaatctatttggaatttatgcgcctcatgcctcaactcgtgctcctctttattgtctacttcggcatggcccggaccctgggcgtacacatctcaggcttcaacgccgccatcatcgtctttaccctttggggcacggcggaaatgggcgatctcgtgcgcggtgccatctcatccatcccgaagcaccaatacgaagccgccgcatccatcggcctcacccgcttacagatcatgggctacgtcgtgcttccccaggcactgcgccgcctcataccccaggccatgaacctggtcacccgcatgattaaaaccacctccctcatcgccctcatcggcgtggtggaagttatcaaaaccggccaacaaatcgtggaagccgtgcggttggaatttgcctccgccgccctgtggatctatctcgtcatcttgatcttatactttttagtttgctaccccctgtccaaatgggcaggctaccttgaaaagaaatggaaggaggcataatggctatactggaaataaaagacatggtcaaagcctacgacggcgaagccatcttccgcggcttctccctgaaggtcgaaaaaggcgacgtcatcgccgtgctgggcccctcgggctgcggcaaaagcaccctgctccgctgcatcaacggcctggaaaaaattcagggaggcgacatcctccttaacggcgaaagcgtcgtcaaagaagaaaaagacatgcccggcgtacgaaaaaaaatcggcatggtctttcaatcctacgagctcttcggccacatgactgtcctcgacaacctcaccctcgggcccgtgaaagccaaaggcgaagacaaagccgaggctgaaaagcgcgccctggccctcttggacagggtggggctcaaagacaaagcccaaagctttccgagaaacctctccggcggccaacaacagcgcgtcgccattctcagagctatgctcatggatccggaaatcttcctcttcgacgaagtcaccgccgccctggacccggaaatggtgcaggaagtcttgtccctcgtcggcgagctggcaaaagaaggaaaaaccatgctcatcgtcacccacgaaatggaatttgcgagaaaagtcgcaaatcgcattctgtttatggaagaaggacacatcatcgaagacacggggccggaagactttttcgagcacccgaagaccgaacgcagccgccaatttttagaaggacaacactacaactaaggaggacaaaatgaaaaagctacttaccctactcatgatcgcgacactcgccctgggcctcgcatcctgcggcggcgtggaagaagaaggcgcccccgtcaccgacaaagccggcacccgcaccgtggacgaaatcaaaaaatccggcgaaatcaccatcggcgtcttcggcgacaaaaaacccttcggctacatggacgaaaaaggcgaatttaaaggctacgacatcgccctcggcgatcgcatcgccaaagaactgggcgtgaaagtgaaatacattcccgtggaagccgcaagccgcgtcgaatacctgaacgccaacaaaatcgacctactcctcgctaacttcaccgtgaccgacgagcgaaaagaacaagtcgacttcgccttgccctacatgaaagtctccctgggcgtcgtctccccgaaaggtgaaatcaccgacgtggcccaactgaaagacaaaaccctcatcatctccaaaggcaccacggcggaaacctacttcaccgaaaaacaccccgaagtaaagctgcaaaaatacgatcaatacgccgaagcctatagtgccctcttagatggccgcggcgatgccatgagcaccgacaacaccgaggttttggcatgggcactggaaaacgacggctacgatgtgggcattaaaaccctgggtgatgtggactacatcgcccccgccgtgaaaaaaggcaacaaagaaatgctcgactgcgtcaacggaattatcgaaaaactctacggagaaaaattcttcaccaaagcatttgaagacaccctcgcccccacctacggtgatgccgccaaggcagaagatatggtagtggaggagaagccaactgacttttaaaaaaataaggaaaggatcgagaggaatcgatcctttccttatttttttggcgcacgagttttgtgaagacactttcttttattcttcgccaacagtagatctttgctttccgagtgctcagtttttgtgtttcgcgatccttcatactcttacaataattaaatctccgcaatactttccgggggagggaaaaagggcgttgcgattcgccctctgccccttccccggggccctcatgacctatcccgacgagcgaagcgagtcgtaggaaggtcagatgcagtcttacaccgtttcgggaaggcgaagcctccacgaaacggatgtatagttgaacatccccatccacccacaaacgccttctatatgtgcgatcatgacctatcccgacgagcgaagcgagacgttggaaggtcagatgcagtcttacaccatttcaaggaggcgaagcctttttgaagtggatgtatagttgtaagccctgccgggcttcgattcctgttgggcttcttcgccattgattgattttgagttggacaaagatactttttcgccaataagaattctacgcccaatttacattcttctttccgcgacacatctcaatgagtagaaaatgccgcaggcattttcttacagcaaaaagagacaaaccccgagttttgttcggagtttgtctgtagtctgacccacgacgaacgtcgtgggtttttctatgcccataatttaatgaaggcgaaaccccctagaagcaattgatattaattgtcaaaattaaaaatgggatatataattgctttgggaagatgtctatgttcttattactagacaaggaggaagcgatgaataaaaagaaaatgccggtaattgtgacggcactggctttatgtgtagccgcacaatcgaccggttttgcggcaagttttcaggatatgccgaaagagagcgaatggtcttataaggcactgaattattgtctggagaaagattatttaaaaggcgttgacagcttacatattgctccgcagtcgcccttaacgagggcgcaaatggcggcgattatgaatcgggtgaaaggaacgacggaagtagcggacatttcaaggttcaatgacgtgcaagccgacgattggttctataacgacatcgccaaggcggtaaaggcgggctttatatatgggcgcagcgaaatagaaatggcgcctaacgcatccattacgagggaagaggcctttacgattttggaccgcgttctcggcgacaaaacgacagcggatcacttggctgattatgacgacggaaaagatgtatcggcatgggcaaagaaggccgtgaatcgcttaattgaagaaaaaattgtaacaggcgacggcatgaatctgcgtccgaaagcgaacattacgcgggaagaatttgctcaaatcgtttacaaggccgttgaaaaggaagtgccacttgaaaaagaagtggtgaaagagaaaaaagaagacacggaaaaaccgccggggagcatcggaatgattacaccttcccatgactcaaaaccggaaccaaaagatatcgtcctttacggcgacgctaatgtggatcaacaacaatatccgctggtcgcacccttcatccatccgcccttctacaatgtgcgtgtaaaagtcaccttggataaagacgggaagattgcctcggtggaagacgacaacacagtttcccaaggcttggcgccgggaacggaccaagaattttttaataaaaagaataaaaagttctttgacttactgacggcagatgtttacaaaaaatttgtgggcaaagaccgcgccggcgtcgaagccatgcaaatgaaaagcggcgaagctgacgccgtctcaggtgccacggaatcgggcaaggccctaaagcaagccgtgcttaatgccttggataaaaaagcgggcaaaaaattcttagaaaaagatcaagtgttggttgcagaggcgccggtcaagaccaatgaaggttggaagattcactttaaaaatcaattgcccaacggcttcaaggttcaacttctgagcgtcaatcaaggcatttacaatggcgaaaagctgctggatgccgcggcctatagttggaaggctgaaggcgatggctttgatcttctcttgaaagatggtaatacccccgcagggaaatactacgtgaacattgtggatgaaaataacaactaccgttcaccggatttcgaatcgggtcatggggcaaccccgaagtatccctgcttcgttattgagaaaggcgcaaacatcagctatgagcatgacaagctgaacgtacccggtaatgagtttgcaaacttccaacaaaatatcgaagaaattgaagtcatcgaatgggatacaacgaataacaagcccgtgatgattaaaggacgggacggtcaagaggtacctaaagcggttgaaatcgagccggtggggcatcatggcaccaagagcaattacgcacaaattcccttgttcaataccgatggaaccgtgaacaaatccgttacggcggggcgacaaccgaagccggtattcgaagaaggcaagacctacaagattgtggtcaagacctacggctacggagatacgggttttatgtatacggcaaagaaggaagaagatcagcccggagcggacgcgaaattaaacggggtatttaatggccgaggagccgtacctcaccgaggttacgattttttagtaaaagtaacgatgaaagacggaaggattgtttccgccgaagataacggaacaacaccaaaaagaagtcaagaccgtagaaaacatcagagatttataaataggaagggcttatctgtatatgccggcaagacgaaagaggaggcagcggcgataacgagagccgatatggtatcgggcgcgaccctttcgtccaaagcggcgaaagcggccattcaagacgcattaaagtagtcggaaaaagccgatctttacttcaatcacctgtaaatgttgccttccgttcgggcatcgaaaggtgatggagaacgaatgtgtaaaaaaactgaaacccgaaataaaaaaggagatgtatatgaagagagtcttaacactcgttctgatgctttgcgtattgtgcttctcgtctaaaaacgtgtttgctcgtgaagccgtgacgatcaaagatccctatttgaaaaagcaaattatggcatcactgaaaagcaaaaatgagatgcatagaaagatgggcaatataaaactaaccgacccggactatgtcaaggatcctggagaaacggttatttataagtcggagctggcaatgtttacgcattttcgcagcgatgaggcagtagaagatttaagcggcatggagtatatgacggaattaagaaccttaaaaattttcaggaaatccgccattcacgatttgacgccattaaaaaatttgactcatttggagcatctgtggcttggcaacaatcgcatcaaagatgtgcgtcctttgagcaacttgacacatctggaagtgctgcgattggaaaacaatcagatcgaagacatcggccccattgccgatatggcaaagaaaaatgaaaagctgaagaagctttatctgtacggcaaccgcattaaagacttttccggattaaaggacaagacttttaaagaaaaggacggatttttcgggtacaatcagacaattacgcttaaaccgaatacggcgaactttcccctcaatttattagatgagaagggaaaattgtacgatttgagtgatatgaatgtgtctgggaccgataaactggtcaaggagtcgaatggtaactatcgttttaaggacgccccggaaaatacccgtctccgtattttttcagatgggtttaagacacagcccacttgggtggtagacatcgatgcgtcggacatgggcaatgatcctttgaagacgaaagttcattttgccagccctgctttagagcgagagattttgactattttaaaggatccatcggtgcgagatgccaaggaggtcattctcagcaatccaaattatgtgaaaaaaccaaacgagacctttatctatgaagacgagatggccttgtttaaaagcttaacgattgtgaacaataatgaaatcgaagatgtaacgggacttgaaaccgccacgaatttggaaagccttaagctatttcaaaacaacctaaaggaaattcgtcctttggcggcgttaacaaagcttcgcttgttaaatcttgattcgaacaaaaacatccaagatttttctgctatcgcctctctctccaatttggaaaatctgtccctggcggagtgtaatgtgggttatctcaaaccatttgaaaaccttacgaaattaaagactttggatctgagccacaacaacattgggtccattgacgcgttaaagaagctagatcaacttcaagtgctgagtttggacgataacttgatacaaaacctcgcgcctctgcgagggaaaggaaaattgcatagtctgagcttaaagtcgaatgaaatcacttccgtggaagatttaaaagatttgcgaaatctgtcctaccttgctttgtcaaaaaatcgcatcaccgatttttcccctttaaaggatgtatttcacgaagtttcaaaagtatttccccacgaggatcaagagattcatctgtatccctcggatgaggtattcgtcattttattaaaagacgagaaaggcaagtcctatgggctggcgtctaaacgactaatcgaccgcgggaatggtaagtattcttatgctaagcaacccgaaatgcttggattggaagtggtggatgacttttatgccaatacaccgcagaagaataaaattgcatggcacgtttccattcatccggatgcgctattggacaaacaaaaagagcaggagaaaagcgaacgcctcgccttaataaaagagaataagctattaaaagaaaaactaaaagaaatggaaaagcttatagccaaggataaggcaaaaatggaggccatggaaaaggaaatgacggccctaaaaaatcgcttggcagagaaaaaagattcaaataaaaattccgccggctaccggtacgtcctgtcgtctcctgtggtcgaatcgtcggaaaaaaaacatgagggcgcaaagaagcaaaagaaactctttgaaaagcgcgtgtttactatcggacaagaagaattcaaggccttcgagggggccgaggagcgtacgttcaaaatggacgtggcgccctatattaaaaacaatcgaaccatgcttccgctgcggtatgtgggtgaaagcctcggacttcaggtcgattacaatgcaagcagcaaaatggtgatattaaaaaaaggcgatcgcacggttttaattgaacaaggcagccaagtggcgattgcatccaatggtgataaaattacgctggacagtcccgccgagacgcttcacggaagagtcttcatacctctgtccaatgtaaacaaactatttgagcatggcccggaaattacttgggattcaaagaaccgcacagtgaccattggcggataaagaaaacaatcttcgtatcatgcataggattcttaaggatgatatgaagaggtaaacaataaaagggtgacgttggatagacatattttctttcatcaaaaataagaaagacccctccatcttggctttgaagccgatggaggggttttagtattttgaatttacaatctaagtgcaacaaaaaatgattcaccgttttctggtaaaatcatgtcgacgaaaaccaatcaaccaggaggaacgatgaatcattgttctcattttacactaaaagagcgtgagttgctaaagcattatatggacatcggcttaaatcaatctgaaatagctacaaagctaggacgcaacaaatcctcaatttgccgtgagttaaagagaaattctttacaaggaagttacttgcgatgcgcaggtactttataccactagaagaaaagaatgtcgtcctcgaaagaagttagacgatgccgtcctcttcctaaaagtaaagtcgttatttttagagcaccaatggtctccggaacagatcgctgcccgcttaaaatacgaagggagtgtttatagcattagcttctccacgatttatcgagccatttattccggcctttttgacgaaccgaatcgatcgaggggcaatagaggatgtattagaaaattaaaacatcgcggaaaaacaaggcatacaaaatcctatgaagaaagacgcggtaaaattccaatcaccaatcccatatccgaacgaccggatgcagctgaaaaaagagagcgcttgggcgactgggaggcggatacggtggcaggtaaaaccggcagggcatgcctactcacattgactgacaggaaaagtcgctatcttctttgccagaaaataccaaagaagaacgcccaatgtgttaagcaagccatgattgaactgttgaaagatgaaccccttaaaagtatcacgcctgacagagggaaagaattttcaaagcatcctgagatatcacagcaactgtctctagttgaattctatttcccgctgcctcatcatccatggcaacgagggaccaatgaaaatacaaatggactattaagagagtactttccaaaaacgaaagatattgaccaatcagatagctatattgaagcgaaaatagaagagatcaatcgtcgaccacgtaaatgtttaaattggaaaacgccttatgaggtttatcattcagtggagttgtacttgacttgacaattcaagcgccaaaagtagatctttgctttccgagtgctcacctgttgttcaagaattatcttttttcatcgcttgtttctgattttgtggtcaaatgggcactcactttgtttgttgcgatccttcatactcttacaataattaaatctccgcaatactttccgggggagggaaaagggcgtatgttttgtggtggttgattttttaaatgcgtagtagacataataaaatcaagttactttcttgcttagaaattgattcttacatggctctgaaacccggggaaggggaaaatgcggccgtccgctctgagctcttttccccgcccccgggtttcaaagccgtgcgggaatggtactttaaacgaataagaaaacaccacgagtcattattcggtatgctatcggaaagcaaagaaaaggagaaaagaagaaaagaaagggaaagaaaggaaaaagccgccgcatctttcccgagtatgaaaaaacagcctcattcagagactgttttttcatactaatcattctttttggaagtagaagaagtgcccttcttagagctcgaactcgaatcggaagtagaagaagcgctcttcttgctcgtacgtttcttagaagaagtagaagaagttgaagaagagcttgttttcttcgaggaagtggaagaagtccccttctcgctcgacgaagatcgccgcgacgaatcttcagaagattcataagaagaagcattcgtcttatcctcatacacatcggcatctttcttggacttcaccgaatcgctgtcctcttcctcatccaaatcgccgtaggtcatttccatgtggcgcaggaggctgtcgtcgctgccgtcgacggcatagtagccgtaggtgggatggacggggcctaccacgccgtcggcgccgtcgcgatagaagatgatgtattcctgattgggcgtcatccccttgggaacgggaatttccaccgtgctcaaagcgccgcggtagtttttaataaactccagctccatttgccccttggcattggtggtaagctccaccaaagcgatgtagtcgctggcggcctccagggcggcgtttcgcttgtcttcgtcttcgctttcaaacaaggccttttcctctgcggccttgtctttttcaggcgtgtaagcctcgtctttttccgaggcagccaccttctgaggcttttcgtttttattcggtgcttccgcctttttgccgcaaccggcgagacacaaacacagtgccaaagccagggctgtgtaattccgtttcattcatacctcccaacacaatcaatctttttctcgattataccacgaaggcggcaaaaaggcccacgggaaagacaaaaaacagcgggaagtgttataatgactctatgaaattacctcaagccatcgaagccatcatttgccgctttcgcgaaaaatccgtgcccgtctacgttgtcggcggcgccgtgagagacagcctcatgggcatcacgccccacgactacgacctcaccaccccggccaagccggatgagatcctcgccatcatggaggggaaaaagaccttccgggaaggcgaaaaattcggcaccatcgccgttttaaccgacatcggccccgtggagatcaccacctttcgcatcgacggcacctacaccgacaatcgcaagcccgacgccgttacctttacggcggatctgaaagaagatctggcgaggcgagatttcaccgtaaacgccatggcctacagcccggagacgggcctcgtggatcccttcggcggccgggaggatctgaaaaacaaaatactccgcgccgtcggcgaccctgcccggcgcttttcggaagatgccctcagaatccttcgcgcctttcgatttatgggccagctgaacatggcccccgatcccgcccttcttgcggcggcgaaagaagaagcctaccgcatcgaaagcctctccgccgagcgggtggccgatgagatgaacaaaattcttcttcaagacgccccttcccgggtgctctacgccatggaagaagccggcgtgttggaaaaaatctttcccgagctcgcccccaccgtgggctacgaccagcgaaatccctaccacgacaaaaccctgttcgatcacatcctttgcgtggtggatcacacaccgaaaacactgcctctgcgctacgccgcactctttcacgatgtgaacaagcccgacaccttgaccgtcgacgagaagggcaaaggccacttcttcggtcacgacaccatgggtgcggaaacggcggggcgcattctcgcccgcttaaagagccaaaaagccctcgtgcgggaagtggaagtcctcataagagaacacatgaaagtccacgacaccatgacggacaaagccctgcgccgacaaatcaagcgggtaggggaagactacatcctcgatctctacgatctcatggcggcggacatggcatgcacctatggcgcaagagacatttcctttatcctcgagcgaaaagcccgcatcaaaaaactcatggatgaaggcatcgtcagccgaaacaccctggccgtaagcggcagagacctcatcgccatgggcatggcccccggccccgccatgggccgcctcttaaaagaaatggaagacatggccctggatgatcccgaagcaaacgaaaaaaaccgcctcctggcctacgctaaaaggcggatcgaagacataaaagtagcacacaacaacgaagaaaacaaccggaggagacacccatgaaactatttggaaccgacggcatccgcggcgtcgcaaacgaagaactaacaccggaaatggccatgaaactgggccgcatcctggccgaacgcatccacgccgcaggcgtcaaaaacccctttgtcctcacaggcagagacacgaggcaatccggcaccatgctctccatggccatcgccacaggccttatggctggaggcgtcgattgcgtgaacctatccgtcattcccacccccggcgtcgcctacctcaccagaaaatacggcgccgccatgggcatcgtcatctccgcctcccacaaccccttcgaatacaacggcatcaaaatcttctccggcaaaggtctaaaactccccgacgccgtggaagaagaaatcgaagccaaactcaccgatcctgattactccccggcacccgtcatcggaaaagccatcggccaaaagaaaaaagaccttcccggcatcgtcgactacgaagattacctcgtgagcctcgtcgaccgagaccttagcggtataaaaatcgccgtcgatgcaggcaacggcgctttgagcaacctggcggaaaaagtccttacacgactcggcgccgaagtcgtcgccataaacaccgcccccgacggcgccaacatcaacgcccaatgcggatccaccgcccccgaaaaaatacaagccctcgtgaaagacaccggcgcccacgtcggcttctccttcgacggcgacgccgaccgcatcatcgccgtggacgaaaaaggcgatatcctcgacggcgaccatattctcgccatctgcgccaaaagcctaaaagccaaaggtgagctcgacggcaacaccgtcgtcggcaccgtcatgaccaacatcggcctcgaccgcttcctgaaaacagaagccatcgccctcgtgaaaaccaaagtcggcgaccgctacgtcctggaagaaatgctggaaaaaggctacgtcctcggcggcgaacaatccggccacatcatcttcagccactacaacaccaccggcgacggcctggccaccgggctccacctactggaagtcatggcggaaagcaaaaagcccatgagcgaactcaacggcctcatgacctcctacccccaagccctcgtcaacgccaaagtcgccaacacaaaaaaacacgactacgaaaaccacgcagggattcaagaaaaaatccgcgccctggaaaacaaatttaaagacgaaggccgcgtcgtcattcgcccctccggcaccgaacccctcgttcgcgtcatgatcgaaggcaaagaccaagatcaactccaagccgaagccgaaaacctcgcccgctatatagaaaaggtgctccaatgaacaaaataaaaatcatcgcagacacatccgccgacttcaccgaagaagaagcccgggccatgaacctcgcctacgtccccttcaccatcgacgtagcggataccacctacatcgacgacgacaagctggatctcgacgccctctacaccgacatgaaagccagcgccgatcccgtgcgcaccggctgcccatcccccttcctctacaaagaagccatcctggcatccggtgccgatgaaatcttcgtcgtcaccatcaccgccaaactctccggcagctacaacgccgccaaaaccgccgtagaagaaatacaaaaacaacaccccgagaaaaaaatcgccctcatcgattccaaatccgcctccgcaggcaccgccaacctcgtgagcctcatccacaagcgggcggaagaaggaaaagacttcgacgccatcgaaaaagaagtgagagccttcgccgaagaacaagccaccttcttcatcctggaaaccatggacaacctcatcaaaaacggccgcatccccaaaatggcgggaaaagccgtcaacgtcctgaacatgaaacccatcatgtgcgcagaagacggcgccatcagcctcttccaaatcaatcgcggcttcaaaaaaagcctggccaaactcgccaaagaagtcatcaaaatcaacgccgaaagaagcgtccaattcatcaccatcagccattcccacgccgaagaaaaagcaaaactctttaaaaactacattcaagacgaaatccactcagccaccatacgcatcgtacagaccaaaggactctcaagcgtctacgccgataacggcggcatcgtcgtcgccctgtaaaatcttgcaatttgacaagatttgcggtaacataggcttatatattgtgcgaaacataggaggacaattatggcaaaaggaaaatttgaaagaaccaaaccccacgtcaacgtcggcaccatcggccacgtcgaccacggcaagaccacccttacggcggcaatcaccctcgtattaaacaaacgcttcggctccggcgaattcgtcgactacgcaaacatcgacaaagcccccgaagaaagagaacgcggtattaccatctccacgtcccacgtcgaatacgaaaccgaaaaacgccactacgcccacgttgactgccccggccacgccgactacgtcaaaaacatgatcaccggtgcagcccaaatggacggcgccatcctcgtagtaagcgcggcagacggccccatgccccaaacccgcgaacacatcctcttggcccgccaagtcggcgtacccaaaatcgtcgtcttcttaaacaaacaagaccaagtcgatgacgaagaactcatcgaactcgtcgaaatggaagtacgcgacctcttaagcgaatacgaattcgacggcgacaacacccccatcaccgtaggcagcgcccttaaagccctggaagatcccgacggagaatggggcgacaaaatcgtagccctcatggacaccgtcgacgaatggatcgacgatcccatccgcgacatcgatcaccccttcctcatgcccgttgaagacatcttctccatcaccggccgcggcaccgtcgccaccggtcgtgtagaacgcggcaccatcaaagtcaacgacaacgtcgaaatcgtcggcttaaccaccgaaaaaagaaccgtcgtcgtcaccggcgtcgaaatgttcagaaaacaactcgaccaagccgaagcaggcgacaacgtcggccttctgctccgcggcgttcaaagagacgaaatcgaacgcggccaagtactggcagaacccggcagcatccatccccacaccaaattcgaagccgaagtctacgttctgagcaaagaagaaggcggacgccacaccccgttctttaacggctaccgtccccaattctacttcagaaccaccgacgtaaccggcgacatcaccttagccgacggcgtcgaaatggttatgcccggcgacaacgccaccttcaaagtcgaactcatcacccccgtcgccatggacgaaggcttgcgcttcgccatcagagaaggcggccgcaccgtcgcctccggggttgtatccaaaattgtcgaataacaaaaaaacaaatagcgaaaggacgtggaaacacgtcctttctctatttaaaaatacatatttctcggcggggaacacacccctgactctttttatggtaacagttcattcttatgtaaacggatagacgagacaaacgggtttatcgattcatctttaaaaatcgattcctacatggctctgagaccaggggaagggcctagggcgttgcgattcgccctctggcccttcccctggaccccatccccctccaccctaacgcttttctaatgtgcgaagccctgccgggcttcgatttgtattgggcttcttcgccgaaaaaagattttgagttaggcgaaggtgctttttccctcccccggaaagaatcgagaaggtataattatagcaagacaaaaatggatcgccatatccactatgtgagtatctcggaacaatgaatagaaacaaatgtgtgaaagataaacgtagaaaaaactacatcatctcatattgccaaggccgatctgtttcggtaagatagtaaaagactaaaaagaggtgttaaatgagagtattgaaaatcttagtggcggcgctattaattgccgtcttgtccggagccctggcgttgggctacgagttggtcgatcgaccgatcacaaagagaaaccacgagccgtcgcgggaagaggcgacgaaaaggatcaacaaattggataccaccaatcccttcaccggcgacgatccccttcacatcctgcttttcggcatcgacaagacggcgacgacggacatgacggaagaaggcaaccccacccgtagcgacgtagtcatgctcgtcaccatcgatcccgtcaccaagcgggcccaacttctttcgctgccccgcgacacctacgtcagcatcaggggccatcaaggcaagaccaagctcggtcacgcctacgcctatggcggagaaaagttggcggaagaaacagtggaagatttcctcgacgtgaaaatcgactattacgccacagtggattacaaagccgtggaacgcttagtagatgccgtaggcggcatcgaagtggacattcccttcgactatagctacgaagacacctatgtggtgcccaatctgcatatcgactttaaaaaaggcaaacagaagctcgacggcgccaatgccgtgcgctaccttcgcatacgaaagatctacgaagatcaagacatcgaccgcatccaagtgcaacagcgctttatgatgcagctcttcgataaattaaaacgtcccatgatgattttaaaaatccccgagctcatcgatatcgccctggacaacatcgaaacgaacctgtcctacggacaaatcgcctatctcgcgaaaatgggccttgatatggatagagaaaacattcaaaccgacaccttagtcggcgacaacaagcgcatcggaagcatcgattactacatcgtcaatcaagcctcggcgagagaacaagtgcgtcgcttcaccgaaggaaaaatcggctactacgaagaaatccaagaacaaaagaaagccaatcaagaaaaagcggaagccgaaaacagcggcgaatcgacaaacgaatcataaaaccaacagaagttctcgcagcggcgggaactttttttacataagggtataaaagaaaaaagcaactgaaaaccagaaaggaagattccatggagattaaacacaccgacggcagattctacctcggcgatgcgaaagcaccggacggcgttttagactaccgtttcatcgatcaaagcaccgttgaagcctaccacacggaaacaactcaggctgtgcgaggccaaggcgtggccggcttgctcttcgatgcatttattgcttatgtagaagaacacgacctgaaagtccgagcatcctgtagctatgtagagaagaaaatggcgggagatgacgcctattcgcaccgcatgatttagcccataagcggactttacaaaagccaaaaagaatagccataatcacttgacatagacggcggcgagttagtataatagcaaggtcatcagcttgatgacgagggcacaacgtcagtcaaaaaaagattgaaaaagtgcttgactacagactaccgccatggtagactatacaagttgtcgcgcaagacgcgtcaaaaaactttttacaaagatttaaaaagtgcttgacaaaaagtcctctgcgggatatactaagtaagctgtttcgtgagatacagcactgaaccaagttaattaaatggtataagagattaaaccataacaatctataagcttaaagcggaacacagtcagtggatccgagctaagcaaactcaaagtttttattgagagtttgatcctggctc

SEQ ID NO: 46 - DNA, 26995 bp, Peptoniphilus rachelemmaiella
  source 1..26995: mol_type = genomic DNA
tttcggagcaaacactacgtgatacttacaattccattttgtgtgtgataaactatgggtgtgatttagtgatgtcattatttcctcctgattgtgattggttggcagacctctctcatcatatcacgctggaaataacgggcaattatcgctaaagctaaacggaacccccggtctaaccgggggttttctaatgcaaaaaagcagcacccgaaggcgctgctcctttttaccgcatgcggtgtttgttggtaatatagtctttcacgttgatgacttttccgtcgtccaaatagatgtagaattcccagcggctgatgatgccgatgcccacgcccatgagggccgcaaccggtgcgatgaccgtccagatggcgcccaggttcatggagacgtttaagatcacttcgtctttttcgtccatgaccacgagcttggtggcattgcctttttcccagaattctttcacggcgtcgatgacttcttcgccgaaattggaaatggtgtcggaaatgtcttccgctttggtctttttgtcgtctttgaagctgaagctttctttcgcttcgccttcggctttttcttcgcccataagcaagcgaatggctttgtctacgtcgccgtcggcggtaagcagggcttcacgaacttcgccgtagcttgccccggtaacggaaatcacgtaatcgattttttccatagtaatcataaatcatggcctccttgttgtcggaattgttttcttgttcttattgtacccgaaaggccgaccgaaaaaaggacggggcggcattgttttacctttctttaccaaaggttagatttattaaccgaagattttcccgcaaagggttttggccgtgtccgtgccggccaagccgccgatccccgtttcgcggagggaggcgggcatggcgtcgcccacttctttcatggccttgcagacttcatcgaagggcacgatgctgtaggtgccggcgagggccatgtcggcgctgacccgggcattggagacgccggatgcgtttctgaaggtgcaggggtattgaaccaacccgcccaaggggtcgcagaccaagcccaaaatgtttacgatggcgatggatgccgcatttaagcaggtttccacgtcgccgccgtaaagctgggccagggccgccgccgccatggatgaggccgcgccgcattccgcttggcaacccccttcacttccggcgaaggtgccgtagccggcgataaattggccgatgccgatggatgtcaaaagagcttccaccaatgcgtcgtcggaggcgtcgatgtcttccgccgccgtcaccaacgccgccggcacgatgccgcagctgcctgccgtgggcgctgccacgatgacatccatctcggcgttggattcaaaggtggaaaaggctcgcgccatggcccgcagggttttttcgtcggtgacgaattgcttgccgctctttgaatattcccaggtctttttcccgaagtccttaattaaatcgtgttttaaattcgtgcccgattccaaggtgcgggacgtagattccttcataatggccagcatgtggtgcagttcgtttaaaatagcggcctttttttcctcgttgcccttggattcttcttccaacacgtaatctgaaatcttccagtctttttctcggcacaattcaatcaatgcctttgccgtttttatcatgaacgtctcctttccatgggtttaataatatccacgtatttcgcaaattcaaagcggggatctttgaggatcggctccaaaattgcgggatccacggaatgggtaatttccgtcaccaaagtcaccgtgtcgtcgattttgttggtgaccatggtttcgatgttgtagtcgttgtttgttaagatagaagaaaccagggcgatgacccctttttgttcctgatattgtaaaataagggtagggtattgattcttaaaggccacttcgatgtcgttaatggccacgattaaaatattccccccgccgatggaagagccggtgacggacaaatggccgccgttgtcgtagaagaacacaatttctacggagttgggatggcgatcccctaaatccgtttccacgaattcataggccaagcccttttcctcggcaattttaaaactgtctctcagctgttcgtcgtcgggcagaatgcccaggatgccgccgaccagggccatgtccgtgccgtgaccgcggtaggtcgaggcaaaggagccgtggagattgaagcgcaccttgtgaaaggggctgtctccgctaatggccaatgcggcgttgccgatcttgcaggcgcccgccgtgtgggagcttgaaggccccaccataatgggaccaaccacgtcaaatgctttgtattttttcataatccacctctattcgttattctatacttaccccgtttgcgactgaattctatcatcgattcgcaggcttattaggaggagccatggctacacttaccgtaaacaatgttcgcatcatcgatcccgtattaaatcgcaatgaaaccgccaccctcaccgcattcgtggaaggtccggacacgaccatggacggcgcgggcctcatggcctttcccgcctttgtggacgtgcacgtccacttaagggacccgggctttacagaaaaagaaaccttggaaaccggcgccgcggcggctctgcacggcggcttcggctacatactggccatggccaacacgaaacccgtcatgaccggcgatgccatcgcaggtttctacgcccgggcaaaggcgcttccccttcatgcctacaccgtgagcgctctcacgaaagacttaaagggcgaggtgctcgtggacatggaagaggcggcgcgattaggagccgtgggcttttccgacgacggctttcccgtggataatatggatcttctaaaagaaggcctcttgcgggccaaggccttggatctgcccattagcctccacgaagaggaccccacccatgtgaaaaacccgggcgtcgacagccgcttcgcccccgccttcgatctcgcaggcgccgaagccatggcggaatacagcctttctgcccgagacctttccctggcccactacctgggcgccaagcttgacattcagcacatttcctgcgccctaaccgcccggctggtggccgccttcgccgcatcgggggcgaaggtcctcggggagatcacgccccaccacctaaccatgaccggagacgatgtgaagacctacggcaccttggcgaaaatgaacccgcctcttcgcacggcggcggacgcatcggatcttgcgacatttatcggccacgaaaatttctgcatcgccacggatcacgccccccacacgtcggcagaaaaaaacaagccactgaaagaggccccgtcgggcatcaccggacttgagaccgcctttgcgctcctctacacggagctggtgctaagggataaatgcaaactggaagaccttgtcgccgccatgactaaaatcccggcggatttttacaagctgccccacaaaggcgtcgccggcggcgaattcgtgctcttcgatcccgaaggcgaaaccgctgtggatgaaaccttcttccgcggcaagagccacaattcccctctcctgggcaaaacattgaagggcaaaataaaaggcatttgcgtgaaaggcaaataccatgcatttgaatagccaataaaaaaggtgtgcgccgtgcacacctttatttattcacttgcctttttcttttgaaatttttgaaaaccgagcatgagggccaggcccacaatattcagcgccgccgcgatgaaaaacgcggggccgtagtcgccggcattggcctgtttcgccgaagcggcgaggacggggccgatgactgcggcaatgcccacggcggcaaacatgtagccgtaattgctcccgttaaaggtggcgccccaattttccacggtaatccccgggaaaataccgagaaaaccgccgtaacacagggcgataagcacaatgcccgtcacggaaatcaccggcgaaatatttaaatacatgagcagcatccccacggtggacacggcaaacatcatgctcaccaccgggtagcgtccgaagcggtcggacatggagccccagaaaatccggcccagggtgttggacagactcacgatggaaaccaccgccgtggccatggccaagggatagccgatgtgctcctgagaaataggcgaggcgtgaccgataatcatcatgccgctaatgccgccgatggcataaattacccacaacacccagaaacggcccatgcgaagcatttccgagggacgcttgtcgccttcgggaatcgccccttgcgcctgtttttccttcggtcccaccaaaagcagggacgcggcgcaaataatgatcaaaatggcgatgcccaaatagcggaaagcgtgcagcacgccgaaggagcgaatcaacgccgccgcaatgggcgcaaagaccacggcaccggagccgaagcccgccgcattcagcccactggcgaggccccgcttgtccgggaacaaagccaccgtcgtcgccgtggtgcagccataggccatgccgattcccgccccggccaccaagccgtaagacaagtaaagccatcccaagctcgtcgtaaacgaagttaaaataaaacctaaaccatacaacaaaccgccgacgaaggtaatccgccgcggccccttcttatcctgcagcggcccgaacaaaatcatgcccaccggccccatgccgaaagaaatactaaaagcgatggtcgcctgcgcgtgcgtgaaaccaaacaactccaccaaaggcccctggaacacgctccacgcgtaacctgccccgaggcataaattgattaccacgcaggcggcgagcaccaaccaacgattgtgcgtcttcatagtcacttcctctctatgtttgttaaaaaaatgtgtagtccttgatagtctaatatattttcccccgaaaggcaaggaatataaaaggccccgcgacggaaaaccaaaggcaaacgacaaaagccccataaaaaaacagagaaaggccgcccggccccgctctgttccttcaatcgcctaaagaggttgcatcatctccaaaataatcccgtcgggatctttaaaataaaaggccttgctttttccgaagccttggtccgtaaaatcgaaagccaccggcggcgacaaacaatccacgccctttgaaagaagcctttcgtaaacggcgtcaatggcgtcggtataaaaacacagctccgaaatcgacggcgcaaataaacccggagcctccttttcagcagcgtcgccgacaaactgaatcaactccaccggtggcgcctccacatgctccgaaccatttaaataagccaccctcaccttgcaatccttcctttgaaacagcgcatccgtggcgggcccggtcatgaccatctccccttgataggtaaggccgagaacatcgcgataaaaagcaatggatcgatccaaatcagataccgtaaggcccacgtgataaatccttccgatcataagaaacctccttcttcccttgccaaagaccgggcaagggatcttcttctgtctttctttccgtctccgccttcgattcgccaccgcttctacccattcagcttgtgtttgcttccgcgcaccttaaaagacacgtcgggcgttcgagaaatgggcttccgcgattcgatccagctgatgggcaatttgctcaaagggcaaatctaagtccaaggtcttcacgctgatttgattgccatagatttgatacacctgatccggctgaatcaacgcgtcggtcttagcataaagcaacataccggaaacggtgttctccctttcgccgaattggtattcacgattttttacataggtaaatatctggtaaagattgcccgaatgaatcgtgtgtttatcgaatcgaacttgcgtcgtgtgctcatagtatttcgcatcaataatcagcactcggttgtctctttcgaggtggatgtcgctctgcatcataggcaacatgtcgccggcgccgtcgtccaacgcccaggggatttgggctgcggcggcagacaactcgggataatgctttttgtagtattccaaaataaatttctcgtagaggcggctcattctctgctcgtcgagaaagtccatcaccgccgtcgtgccgtcatcacgggtatgaagcagaccttttacgacaaaatagcaaattgcgatcagcattctgtacgtttgattgtgtcgattgtattgcagattccaattcactgcacgcaattgaatgggcgtgacgtcggcaaaaaacaccatgaacctgcgcagctctttctttctgcttttggagatgtctgcctttaggagcaacgccaccgtggatttaatgatttgattcatcgtggtgttgacggaaaaatcatcgtatgtgcaggtcaattgcttcctgagcatgctgtttgtcttaatcgacgcgcccatgtcaattttccctcgtatcgtggactgcgcctcggtgtaaggcaagtacgcctttcccagcccgcgcttcagctgaaaggcgatgcccttggccagaatggccgccatcagttccgccgtgttgctgaattcttccgtggcgatctttttgaagccccggcggttcagtgcctgaaaggcataggagagcatgtaataaatgttttgaaccggtatcactgaatcgcgctccttaacctgccgatccaattttccaccttcgccggttcatcaaaccaatactctttcaaaaggggaatcaactcgtattccacaatgccggacataacttggtcgtcgatggtctcctgcgaaagattgcagaaataactatggccgatgcagaagccttcccctaaggcgtcgtccgcggtaatgtccttgtttaaattttccacacaggcgatcaagcgatcaaatttttcattttccaggctctgtttgtattcttgaaagccatccgtctcgaagcccggcttgatttcaaaaaaggcaaatcgccttctcaaggcgtaatccagcatggccaagctgcgatccgccgtgttcatcatgccgatgatgtaaacatttttcgggacggcaaacttttcgtcggagtataagagctgcagcgagacgcctcgcttgtcgttttcaatcagcataaagagctcgccgaatattttgcttaaattcccccggtttatttcatcgatgataaagaaatagtcgttgtccccgtcaatttccgcctttttgcaaaagttgtagaaggcgccgcgacggagctcgaagccgtcggaagagggcctgaagcccatgatgaaatcttcataggaatagctttggtggaattggatcatcatcacgcgctccacatcttttacacccatcatcgaaaaggccaatcgcttggcggcaaaggtcttgccgacaccgggtgcaccctgcaacacaatatttttcttgacttgcaaaatgccggccagcttctcgtaagcctcctccgacagatacacttcagacaagaaatctgcctttgtataaatcgggtaggtcttttccacttcttccacatcttcttcagactcgtcttcaaatatggctttcaggctttccacatagtctgtgtagggggtaatgtccgtgagtgttttcatggccgcttgctttggttgaggccactccccacggtgggtccaatttacctggcgaatatgtttaaactcatcgcttctggcgtcgtcgtattcataatccgacatgacgacaccccggccgatcagccgatgcatgccctgttttacaaaaacgatgtcgccgatgttcatttcattggcaaattgccaagttaagtgggcagagtttatgtaggaaagattttcatcataaactgccttcatttttgccttcatggcatccttgctttcgtaggcggttaaatcgcccatttcgccccaaccgatggccatgatgccggaattataaaactcatcccacatagaggagcctttccccggcgcgtagatccaataacgcttcgtccgaacatcgtcgtctgcaagtgcagtggtttttttatccgacttagctgagttagctgagaagacatttttgtatatgtcagaggccagcgctcttgtcatctccacggtcatacctgcttctgttaaagtccatatgccataaacacttttatcgatgtatccagcatttaccaaataactacgggcaaaagccacttcattttcaaatttgtttatattattttttcctctgataacgctgatctcttcttccgttaaattttcattctctattatttttgctctcgcctctgccggtgtggcagagccacctaaatctcgaagcgcctgaattaatggagcaaaccattgaagaattgaggcattagaaaatttattttcctttttctccgctttttccttattcacctgttccgaatagacccaggcttcaaaagacagcgccttaaagtcctttaactcacttttctcactctgcaaaaacgccctcaacgcctcggtaatcttaaaatatttttcagccggcagctttggcttaatttcaggaagcccttttacaaacgtggcgggcaatttccccgatttataaatataccatctgttgcgcctgtctaaattcaaaaatacatccggcgcaatccagtacaacgccatggtgattttactattgccattgccttttttattcatcaccaaatcgaaataatgggacacggtcttccgattctctgccgtcgaggcttgtgcataggccaaggcagattcatacaaggcccacaaatcatcgatgtcctccgccccccgttgatccacaaagtaatagaacgtggcattttgaggattaaggacgggcaaactatcaaaggacgtgggcacggccctcttcacctcaaataacgcggcaatggccgtgagaatcttaatacggttttcgtccgtcagctttttgttaaaaaggccgaacaccgtaaagggatcgatatcgacaaggcgattgtcccgctctaaagtcggcatctccatgcccgacatggtgtaaatttcccttaccttttctatcagttcgtttctcttgtccttgtaatccagcaattttaaagcgaattccccataaaaatccacccagtcgtattgatcctgcttcttcatttgatcctccatccttttgtcaaaccgcgatccatggatcattcaggccgcgaaccgctctccctcgcattaatatgtaacggcgaaatccatccctttcaccccgaacggcattcatgcatcgattctccacctgtatttacctgccaaatagtttcacccatttcatgtcttattttatcataggacgatctttctttactccttggcgacaccttcgatttctttcaccttaacgcacaaaaaaacaacccctcacattcggggttgtctgcgatctaaaaggcccaaaggctcgcgatggcaatcattgcgcgccgcccatagggttgtttcctatttcgttgtttccttcaaaataattttataaaccctttcgagaccgatgggcacggagctttccggttccgcattttttatttcaccgccgaaataaaccaccaccgtctttccctcaaggccttccgtgctgacaaatccatccttcccgtgatctaaattttcaatgggcagggcgatgggcttggtcaatcgcgccttaaaataaaacccatcgtccacctccgtcgcctggacgagaagggaatcctcttctgcgtgtatgacctttgccgtaaaatgggcaacccatttgggaatcccatcgccgtcgttctttaggttcaggtccttaaacaaaatccaccgattgttcaagcgaacattcatatagcccttttcccaaaattgatagtcgtagcccgtgccgaaattcgattgatcatcccttacgggcttcttggttccgtcgacggcggtttttattttgccgtctgccgtgccgcaggtggccatggcattttcatagcccgtgtccacgtacacaacccccgccaccttgaccatgggcggataattatgttctgccctttcctcttcctctgtgtcggtcttcatgcaagcgaccgataaagctacggcaatgatcaggataagggaaagaattcttttcatgtgcgcctcctgcatagtattcattctcgtacacgtgagggatgagggtgttttctacttccgataatgtctatttatgatttcaatccacgcacccgcgaggggtgcgaccgcagctgctttagctcggcgcaaaacgacgggctatttcaatccacgcacccgcgaggggtgcgactggacaggcccatgtgacggtggaggtagatatagatatttcaatccacgcacccgcgaggggtgcgactttagcttataaagagatcagatgcaaaaaagacatttcaatccacgcacccgcgaggggtgcgacgagtttgctcttttttggggaaatatgtgtttagatttcaatccacgcacccgcgaggggtgcgactgattttatcgtccgaccattcaagcgtataatgatttcaatccacgcacccgcgaggggtgcgacaattattctcttttcgaagttgcgctaatcgctttatttcaatccacgcacccgcgaggggtgcgacctacgtgatgggtggttgtcacaagtatggtggaccaattgatttggacacgtcaacccctatgcattgagtagtgttgatccgtattcgtatggtgtcatgtcgtcgaggccttcttggtatcggcggtagcggtagtagtttatgtagtcggtgacggcagcttcgatctcttggtcattggcgttttcgtcgaatgttgcttcttgtttcatttttccgaagaaggattcgcagggtgcattatcccaacagttgccttttcgggacatggattgaatgaggcccatggattggatggtgtctcggaatttttttgcggtgtagtggacgccttgatcggagtggatgatggcgttttggctgtggccgcaggttttgagttgttcgagggtctcgagaacgaagtcgaggttgtagtttgtgctggttttgtgggcgacgggttcgttggtttgggaatcgatgatgacggagacgtaggagaagtggccttggtgtttgatgtaggtgatgtcggtgaggaagagttttctggctttcccgggtttgaaggcgcgtttgacgcggttgggcgcgattttgttttcttggccgtcgttttttcgtttgccataggggcgggattgtttcacaggacaaatgatttggtattttcgcatgatgcgctggatttttttgcggttgtagatgatgtcgtagtcgtttttcagaaccatgcgcagggaacggctgcctttgttgtaatattttccgctatggtcataggctttttgtatgaagtacagggcttcttggtctgcgtcttctcttcgttgccggttttctttgctggctttgtagtagtaataggtgcttcgcggcagttgaaggtttttgcaaagggctttgatgttaatggcttttccgtaggcttggacggtttcttctacgattttacagagatcagtcgttccataggccttcttgtcgcatcgcctccctcctagccagccagctttttttaatgcttcgatctccgccgcttgttgttgaatgattttttcttgcttcgccagtttgtctttggcttttctcatgtcgtcgatgtcgtcaatggctatgagggcttcattcgcagcttcctggtcgattgaagcgagaatggtgtcccgaatatggcgttctttccaccgggcggtggctcgttcgatgcgtttgtcgcctaagatttcgggatcgaatccggcttcaatgaagatttgtttaggccgcttgcccgtggccagtgcatcaatgaagtgttttttaaattcggtcgtatagaaaatgtattgttcgttgactgatttgacatttggattggtgcgtaagatttcttgttcttcagcggttagttttcctcgtcccatggtttccctccttaattgaattatacacgatttgaggtagggggtatgtccaaatcttggggaccgggttacaagcgtacgcagatttcaatccacgcacccgcgaggggtgcgactgtgtcggatttttcttcccaagattcacccagcatttcaatccacgcacccgcgaggggcgcgacgaaagcaattttcgaaatgttacaatatagacgaaatttcaatccacgcacccgcgaggggtgcgacccttgtattgagtgttttttagcaagtcaacctaacatttcaatccacgcacccgcgaggggtgcgaccactctatgtgtggtataggtcatgtaggggcgcatttcaatccacgcacccgcgaggggtgcgacatcgaccttttattccgttgtcaagtctttttttatttcaatccacgcacccgcgaggggtgcgacacgtatccggggaaatgtgaagtgatttttgaattatttcaatccacgcacccgcgaggggtgcgactttatacttccgatcaagaaataaacccaaattatttatttcaatccacgcacccgcgaggggtgcgactaccacgtctaacggtatgtatcacgcccgataggtatttcaatccacgcacccgcgaggggtgcgacttgtgaatgatccagatcaacttcgcaaattatatatttcaatccacgcacccgcgaggggtgcgacttcataagggccgtaccatgtttcttcgccgtcgatatttcaatccacgcacccgcgaggggtgcgaccatcaagagcgggatcgcgaggattacatcgaggaatttcaatccacgcacccgcgaggggtgcgacggattatctgcccaaatgggcggaagtcgaatggatttcaatccacgcacccgcgaggggtgcgacaccgatccgaatgtaggtttcggtacgggtacgggatttcaatccacgcacccgcgaggggtgcgaccaatttttgaaaacactcatagaaaagggttttttatttcaatccacgcacccgcgaggggtgcgacccttttttacgtctactaagattgattcggtaagatttcaatccacgcacccgcgaggggtgcgacgcgagatcctccagccctatctcgacgaaaactggatttcaatccacgcacccgcgaggggtgcgacgaggcggcttgtaaattgcgaaaagcggcgttttcatttcaatccacgcacccgcgaggggtgcgacgatcaggaaaaaccaggtccattaaaggaaaaattatttcaatccacgcacccgcgaggggtgcgacaagagactgataactcttttgtatttgctcacttatttcaatccacgcacccgcgaggggtgcgactcgtcttcggtttcgtcgataaaagcttttccataatttcaatccacgcacccgcgaggggtgcgacagtgaaaaaaacgtggaaaaaatcaaggcggaattatttcaatccacgcacccgcgaggggtgcgacttgagaccatagggccctccgcgcgtgacgtaaggaaatttcaatccacgcacccgcgaggggtgcgactgtcgttgaccgtgattcaataatactatcgccgccatttcaatccacgcacccgcgaggggtgcgacctgtttttttatacctaaaatggaggatttgagatatttcaatccacgcacccgcgaggggtgcgactgacgacgggaagacgtccgagcggggaaagactatttcaatccacgcacccgcgaggggtgcgacgggcgtgactgaaatcataggtcacgttatccattatttcaatccacgcacccgcgaggggtgcgacgatgacgacgggaagacgtccgagcggggaaagactatttcaatccacgcacccgcgaggggtgcgactttggcccacaggcgagagcggcggcaccggtcgcgatttcaatccacgcacccgcgaggggtgcgactacgagatagatattatagtgtagaaactgggaatttcaatccacgcacccgcgaggggtgcgacttgccgcagaggtgtttgcgattacatctaatgtcatttcaatccacgcacccgcgaggggtgcgactgtcccgcacgttccgcgggtccagcgtggcgcgatttcaatccacgcacccgcgaggggtgcgacttaaatcgttccattccatccgccccaagtgccagatttcaatccacgcacccgcgaggggtgcgaccaaatttattgcttacgttaacatttaatttttcatttcaatccacgcacccgcgaggggtgcgacctatatcgacttccggggccgccgtcgcaaaaaagatttcaatccacgcacccgcgaggggtgcgacaggactggcgggacgtaagccaatggccgagttctatttcaatccacgcacccgcgaggggtgcgaccctatgggcttattatactacatattgtgtgtgcaagatttcaatccacgcacccgcgaggggtgcgacctgaccaaagcttttggctccgatgcctggatcatttcaatccacgcacccgcgaggggtgcgacctttcataatttgtaattactacccccgtattacatttcaatccacgcacccgcgaggggtgcgaccctgcttttgcaaccatgcatacttactctcaatgatttcaatccacgcacccgcgaggggtgcgacaagaccgctttccgtcggcgtacaagtacacgcccatttcaatccacgcacccgcgaggggtgcgacattatgacaactacggtcttaaagacttaattgaaatttcaatccacgcacccgcgaggggtgcgaccatcggtgatggacaatattatagctttttagatatttcaatccacgcacccgcgaggggtgcgacgagctttacccaaggcttaaaagagccgttacagatttcaatccacgcacccgcgaggggtgcgactaatacaggtacagagtgggaaatcggtcacgttatttcaatccacgcacccgcgaggggtgcgacatactaccgccgccgcacgttgtcaatgattattttaatttcaatccacgcacccgcgaggggtgcgactacgtcgctactgatttagattatgctttcaaggatatttcaatccacgcacccgcgaggggtgcgacgagctttacccaaggcttaaaagagccgttacagatttcaatccacgcacccgcgaggggtgcgactaatacaggtacagagtgggaaatcggtcacgttatttcaatccacgcacccgcgaggggtgcgacatactaccgccgccgcacgttgtcaatgattattttaatttcaatccacgcacccgcgaggggtgcgactacgtcgctactgatttagattatgctttcaaggatatttcaatccacgcacccgcgaggggtgcgaccagtcggcgacacgtgggcacgcaagcaccgcacgaatttcaatccacgcacccgcgaggggtgcgacgagcgcggaaatgcaagtgcagcggcggaaacgactatttcaatccacgcacccgcgaggggtgcgaccgcgaagaggtggccgccatgatcttaagagcgcgatttcaatccacgcacccgcgaggggtgcgaccgtccccccgctgcatggatccccacggcaccttttatttcaatccacgcacccgcgaggggtgcgacgttatatacgtaaatctggtttgctcttttttagatttcaatccacgcacccgcgaggggtgcgacgtgacgaatgaaagattaaattaaggaggtaacctatttcaatccacgcacccgcgaggggtgcgacccgtcatcgcgcaagggaatatgcaaataagtaaaatttcaatccacgcacccgcgaggggtgcgacgcagaagaatatatgtacggtgatagtgagtttgatttcaatccacgcacccgcgaggggtgcgacccgaacgtcaaggcgaatggctagttgatgatttatttcaatccacgcacccgcgaggggtgcgactaaatgataaataattaaatgatagagtaggtgatatttcaatccacgcacccgcgaggggtgcgacttccggcgtaaatcccaacgtgtccgggattgccatttcaatccacgcacccgcgaggggtgcgactcggcacgtccgcagcgtatgctgcgagcgcggcctatttcaatccacgcacccgcgaggggtgcgacgcaggttatatttcgttcgcactcccgcgagaattatttcaatccacgcacccgcgaggggtgcgacaaaaaatcttatggccaggtttaaggtgccggcaatttcaatccacgcacccgcgaggggtgcgacggaatttattttttagtttttccatggttgttttaatttcaatccacgcacccgcgaggggtgcgaccgaggtcattaagtttgtggacctccccgaattccatttcaatccacgcacccgcgaggggtgcgaccgaggtcattaagtttgtggacctccccgaattccatttcaatccacgcacccgcgaggggtgcgacttgagaccatagggccctccgcgcgtgacgtaaggaaatttcaatccacgcacccgcgaggggtgcgacaaagacgagacggccaccgcacaagcgggcacgatgatttcaatccacgcacccgcgaggggtgcgacataggggggtcattatgccacgcacacaaatcctattatttcaatccacgcacccgcgaggggtgcgacggagaaaggcaaatacgtcgccagcgtaaaaggaatttcaatccacgcacccgcgaggggtgcgacagcgatgcgtggataaaagccctcacagtggagggcatttcaatccacgcacccgcgaggggtgcgactgttttttgtcaacttcttttttgatcctttaaaaaatttcaatccacgcacccgcgaggggtgcgacgtcaataaagattctttatctttccagttgattctatttcaatccacgcacccgcgaggggtgcgactaatacgacgtgatggccttgatccagttgtgcggatttcaatccacgcacccgcgaggggtgcgactttgcttaatcactcaaaaagttactttttgagtgatttcaatccacgcacccgcgaggggtgcgacacaacttttaacgtcaaatcctttaactctccaacatttcaatccacgcacccgcgaggggtgcgaccgggtgatcggcttaacccgctttttgagcggcctatttcaatccacgcacccgcgaggggtgcgacccggtggtgtgtacgtggtaatacgtaggctccccatttcaatccacgcacccgcgaggggtgcgacccggtggtgtgtacgtggtaatacgtaggctccccatttcaatccacgcacccgcgaggggtgcgacgaagaggttaagcctgaggccttgatagcggaaattatttcaatccacgcacccgcgaggggtgcgacaactgcatagatcatgtgtttgatttagagataagatttcaatccacgcacccgcgaggggtgcgacgggataaaaaacgccttcaaacacccaagcctataaatttcaatccacgcacccgcgaggggtgcgacatttcggcgtcataagggacaagatcattcaaagttatttcaatccacgcacccgcgaggggtgcgactcggcggtatggttaccgccgtgagttggtttttaatttcaatccacgcacccgcgaggggtgcgaccattgaaagaagttaacgcagccgcccgtcgcgtgatttcaatccacgcacccgcgaggggtgcgacatggttcaagaggccgtaaataagcggttagtcgatttcaatccacgcacccgcgaggggtgcgactgattgtgctagttacttttacgtcttcgggtgacgatttcaatccacgcacccgcgaggggtgcgacatcgacttcttttctcgttgtcaagtcttttttttatttcaatccacgcacccgcgaggggtgcgactcatttttccgaatcttccctttcttcaatcaacgatttcaatccacgcacccgcgaggggtgcgacaacagatttccagtttcgttgtttgaaatggtaaatttcaatccacgcacccgcgaggggtgcgacatgccttcctttcgaccaccacgggcggagttgggatttcaatccacgcacccgcgaggggtgcgactgtatttttgagcccctctccgggcttttttcatacagctaagtcatttttaagcgttttgtcgcttttttccgggactttttgtgaggcggtctcggcgcttttctgttcagctcgacctctcaaagcatcagtaggtctgattcggggttgtagctatcatccaatcccatggtctcgacccgccgttcccaatgctttcccaggttgtagattcgtatggaatctttctttggctcaattataccatttaatttggatttcacggtcaccaaggttgcgggatcgatgttgagctcaaagacggaattctgtacgcgttggccgtaatccgtgcagacttttgccacttgcctcaggcgctttcgcccttgaggggtgacggtttccacgtcgtaggtgagtagtatttgcatttaacctcccatcataaatggcggataggcctcgatatcttcgcgcaggtaggcgttcaataattgtgcctgcacatggggcaagagacccagtttgattttttcttctgtaaaaggatgcgtgatttcttcttgcccgcgtttgttccactggttgagggcaatttctcttcctttgtcgtttagcaggcaggcgccgttttctttcacttcgaaatggcgtttgtcaatgcggttcagattcaccaaagcgaggcagaatttatccacgacgaaggcgcgcatttcttcgatcatatccagcgccatgctgactcgccccggtcgatcggtatggaagaagccggcatacgcatcgatgccaacgccttctaatgccgctgctgtttcgttggcaagaatggcgtagaaaaaggagagtagggcgttaaaccgatccatgggcggtcgcttgcttcgctcgatgaagtaaaaatcttctcgctgctttacaatgagctcgtccagtacggaaaagtagaggcgggcaatgaccccttccatgccccgcagactgtctttatctttacaagttttgatctccgccatccatgttttttgtggcgtcgatggcttcttgcacccgctcagagtccagggcttctttgtggtccaaccgacctcgaatcaacactttccgcgaattgtaggctttggcatagatcatgtttctggccacgtcgagggaagcctcggtttccgccagacggtactgtttctttcgggtgtggatgtttccataggaagcgcctatgacgcggccgcagtatttgccgtagggagtaaagaaggtgatgggcacgtgctcttccatgcagagtttcattaagtccgggctcacgcccatgtagttgaaacagacgatttgccgcagaatgtgaatgggaaagcgacccatgcgtttcccctccagggtcaccaccacattgaggccttctttgcgcaggtaatagtccggattggtgacgtatagaacgttcagaagttttttcatagttctgcctcgtaaatgtatcgttggacattttttgcttttttggtaagccgcgggcgacagtcgtcgtagagggagcattgggtgcagtttttaaagaattccgcttttggaatgtgacgcttctcgtagcagtcgtgcatggcacgggctgtttcagcaaccagttggcgcaactcgggagtgtaggttactttttcacgggaatccgtctcgtgataataaagatagccgtgactcatgcgcacgtgcatcgtctcttcaacgcagatggcctgggccatgagctgggcctcgtcgtagttgccttttttctttttgcctcgtttgtattccacgacgataggcatccatttcccttttcgcccttttaaaggaacgccttcttctcccttatggaattcgatggcatcgaggcgaccggaaagtcccaatgtcttggaactgacgtccatggctcgggagatgatccgatcttttcttttttctttaatgaaaggctgatcgactttctcatgaatcagctggccttcggttgtgtagctgttttcgctccacacttgctccacgtgaatcagggcccactggcgcttgcagaataaaaagtgctgaatgccactcaacatgagaaagtcgtcttccccgatcactttagagccctttcagatgttcgacggtaagcccttcttcttcataggcttttagtttttcttcatccaatcggaaattgtaatcttcgtagtggggcttcacggtgcctatgctcaactcgtcgtgtaaaagcaagtctttgatcttgccgctggatacatcgccgactttcgacgaatgattgaaccaataaatgtcttttacttccatggagccgtccggccgggccgcggatacgtcgttgacaaagagggtgcgaatgcattctttcaaaaccttcaagtcttcttcgtcgaatccggttttctcggccaaatagcagttcacgctgccgttgaccacgtaaacgccccaatccacatagtgcttgcttcccatggtatcggcacttcggcttttacctgccttcggctccatgccactgacgctcttggtgatttgcatggtggttgtctcaatgggatccacggattttcctatggaaatgctgacggggccgcgaacacccagggcgcgcttttgataggtgaacacttggccgaaggcgcgaatatccatccatttttcgttggcttgttcggcaacttcttcgtcggaaacatctttattaaagctcgcattaaagcggccttccaaggaattgaatccgtcgtcgcaacgctctgccgctttcacgaagatagcgtggtccatgtcctgcatgcggtttcttatttttcgcttcaggcatacgtcactgatttcgccgtagcctctgccgtcgatgcgaggcatatttcccgtcaaggggtcgccgttgggattggccccttccacttcgatggtaaagataaagtcgactttatggttaatcatgatctacctcctcggtttctgttacttctttgtttttccctgagtaaaaagcttgtctttgggcctcgtagccaaaaatgaatccgtagtccaatggacgattgacttccactgaatccatatcgtagctttcatggagcatattggtggcttcatgaatctcgcgcgtcgcgttaaaaaacgctgcccgcttcagcggtttatcgcttctttccaacttccgctcatagggtttcattaagtttcttaagcgcaacatcatggtcgccggcttattggtgtagctggtccacattttttctgcattggtgcttcgtccgtctttttcgccgaaggtactctcctctaagtactcgaatgaagccagcaagcgaccgaataagtacgatcgatcggtgttttctcgatttagcatagcgtctttaatccctcccttatcttttaacacggccaaggcgcaaaacagcacttccatccacgtcttgtcgtagttttgtcggtgacgaatgttcacggccaaggctttttcgaaatttcgtggcacggcgcgcccttccacaagagccgttacgatgttttggtactgatttttcagaaaatcattttttgctatttctaacatcccgtcccgctccacgccataggcggccagtactatgcgcctcggactcggcgtaaactccttgtcccgattttcattgctgaaaccgcgccaatggtacttttcctgccacgccaccagattttcttttaaacgggacgcgctcaaagaccggaaatacttggcagccacacgtccgttgctgatcttgtcgaaaatggcgatgtaataggttgcatcatcagaaaacaggcgcttgccgttggtaaaggacttgacgatgtcttctgtcatttcatcggcgagcatggatgcatccgacttttcttgcttcaaggccagcaggcggtttttaacagaagatgccacttccgcggatttcgtcggattaaattccgccgcgttggagagatcgtcggaaaaccagctcaccatattggcctgctcgcctaaccagcgccgcgttccttgtcccgatagtaagtacttggccatgagatgaatcttttgactcgtttccatgcctatttttatgctctgatctggcattgtaaaacgacctcgccaattttcttccttggcctcaatttgcgaaactaagcgcgccctccccattaaaggttgatgtttgatgcaaagatagtcctgctttccacttaaattacaagtaaccttttccttttcattgcataggcagttcgtaaaataatcgcgatacttttcttgcaagtcacggttatcggatacgctcacattcttctgcccatcatattccgctatcgtgaacatgatataaatcttgcgtatcttctcgatctctttcgcacgtttcttttcctcttcctctgctttattaggatcagtgatttttaaattttcatcaatcggttcaggcagaagagagtcataaatacgtttaattgccgcatcctttttgagaaaatcgtatattgtacggatgtagtcgatttcttcgtatgcaagccaagaatcaagttggtccatatatgcctgatttcgcggacttccatcctgaacgatgtaactcatattatcgacaataggatgcggcgccacattgcttgagcgagcagctgaatcttctgttacaggaaaaataatggtttccccttttggcacatagtcatacgctatgaaccggccttctttgcttataattacctccagaatattcttgccgtctgaaaccgcagaatcataaaacattggaacaagaagacttccataagcatcgggctttcccaccatgtcgtgttctaaggcgtaatcataggaatccagtaaagctgtcaataaactcatgtctcacctcctttaatagtcttccaattcttcgtctacggactttgtcagcgtcggcaccttaaagtcgtaattgcggacctcccgcagaatgcccttcccttccattgcattgtagtcgatgcggccatttttcatgttgatgggcgcgtaaacggcttgaagcatgccgcccggctccgtggggtagacaaattcgttgaacataagcccgaagcccaaagtcttgtcgtcgtagtaacccgggtcgttttcatattgctctaccgtcagctcctcaatgtagccggcgcactcgcttgtgccgagaaagatcggtcgtctgccgcctcgcttcagggagcgttccgtaatggcttcgtgtttgttgaagttgcgatcgccttttaagtcgtctcgcgcctcattccactcgaagtgaaatttaatgtaataacatacgtcttgaagataggtgtatgcactgagatcactagcgtaattttttagtaagagccgcgttccttgcgtgtaggactcgatgctgtgcatgatgcggacctcgtccaccacgttttttaagactggcttaaaatagttggcgtcgacgatgccgcgaagcatttcccgagttgggatcatggcgctcattttctcccctccactcttactttcaggagacgtgattaatgcccgatccccgtacacttttgcgtagaaaaactttgattgattcatgagttcacctcctttcatcttcatattagtttataaaaaattccctgtcaagttcttttcttctgtttctatttttgatacaatggatctgtcagcgaaagctgtggattgaaagatatttgtttagaaggaggccgctacggcctttttttatttacatcataattcccccctcataatccaaatttaatccaaaatctttgtcgtaaaattccttgggtagtacctgcaccatgccgtctaaaattgactcgcaaacattcgtcgtttttttcggcaaaggcacggtatagcgcgagaggctgcgaatcatttggcgcgcctcttttaaagccttcggatcaaagcgcgcggagcccatttccatgtcccgcaggcggttgacggcttcctccgtttcctcacataaaaccaccgccacgtcttgcgcctcgtcgatgagctcaaatgcttcgtaggcttctttaaatgactgaaaaaagttgatgaccttgccgtcttccaaaaggatgccgccgtctaaagatgcggcgccgggagtggatttcagcaaaatgtctttcttcatgggattttccgaaagcagatcaaagacgggagatagggcatccttttttaagttggcgtagagtttttcgaaataaggagaaataaaattctctatgccgatttctccttcctcgtctcttaaaatcaagtagctcgccaactttctttcgcccatgcccttcagaggcgcgatgttttcttcccgccgatccatgttcaccacataggtataggcctctttgcgcttgccctctcgattgcagcgacctctggcctgcacgatggagtcgatgccggtaagggagcgcaccaccatggcgaaatctgcatccactcccgcttcgatgagttgggtgctcacaacgcaaatgggatcgtccgtctcaagtcgcgtcttgatctcgcggattcgcgccaggcgatccgccgccgttagattcgtggtgagataataaagatccttcgcatccatggcgcacgccaatcgatcgtaaaggccgcgcaccgccgccttggtatttagaatcaccaagcgcgatgtttcctctttcgatagaacgaaggccgctacatcgtcgagggattgttcctcgtcgatttttcccaagagggctactttcgcccgttcaaaactttttttgtcttcttcagccactacgaccaacgtggtgtttttttgatgttcgtcgccatagtccaggcgatgcttcaaactcatggatccgtaggcgggctgggtcgccgtggataaaaccacggtggtgttcataaccgccttcatgaaattcaatgccagattcatcatgtagagcacatccgtcggcaaagattgcagttcatctaaaaccaccaccccattcacgaaggatttaaagcgggtaaggttggcggacttccccttaaacagggtgttgaaaaattgtaccatggtggtgagcaccaccggcgatgtccaatcgcccagcaaaaattggcgctgcaccgccgccatggaatcctgtttttcatcttccgcaccgcgagacgtttcatcttcctcatcttctaccacattggagtgatgttccaatacctgatcctcatggcccaaggtttttttcatggtctcggcattttgttccagtacggagagataggatgtaatatagaaaaaacgccgctttttccgatacttcatttggttcacgccgtagcgcagagaaagcagggtcttccccgcaccggtaggcagatccaatgtgtaaatcccgctatcatccgctttagagcgggccagtatggcttcggcaatggccgctcgaccacggctcataccatctttcggcgggccgtaggcggcgtaggcggcgagaatgcgcgcctcgaaatcctcgataagcgcgcgaagagccgcctcgtcttcctcttctatgacggtgtcgtaggaattgatcgtgtcttttatatcggcagattttaatacgctcactaccaggcgcgccaacatcccgcggtaaaagctcatggcttcgttcacatcgtcgctactcctctcagccaaggcatttagtttttctgccacgtttatgtattcgtcaaagccttccgcaaaaagttttttaagatcgatgccctcccttttccaatgctcttgaaaagcatccaggtctttttcaaattccggagacaccctctccctttccgcccgctcaaaggacgtgtagacatagcgattctcccggttctgacgaaccatatcgtagggaccgtggtgagacataatggcataggtcaaaagatgaacataatcgttaaaggcgatgagtacatggacgtcctcgttaatttttttgatgaccggcgcaaacgccttatctatctccccgccttcaagaccgcaatacacctcatctaaaaagcacagtgtcaaaagaccgccgtaagtggaatggtctacgcgatcctttgaattggttctgattttattctggaaactcgactttgcctttccgcaatcatggagtagacccacgtaaaaaagcattttttccatggctacttcttttcccatgcgggcgcactgcgccgccgtgtgatacaggtggtcgtggagggtttgtcttctcgatggttctttttgatcgatgtgggcgtacagattgtcgaacataaaaacctcctcgtctttttgtatttagtatatactcagacacagcgaaagacaaacatatattcttttattttttggttttttatggctctataatatccgttggggagtaacctcctcaatggatatttttatgcaaaaagatagcacttgttttccctatcacctaaaattatatcaccacaaaataataaaggggggcaaacaagtgcaaaacaatattaccacattacttttaggaatccaagatgtcgaggtcaccggtgtttcagaagaaagacgcctgattaccattgattgcaa

SEQ ID NO: 47 - DNA, 23754 bp, Peptoniphilus rachelemmaiella
  source 1..23754: mol_type = genomic DNA
gcaaaactttcatcattttcgaaccaaattactctttgtttgttcaaaagatcggtgatggatggcttttaggaaaacaaaaaggagcctagttttcactagactccccaatggttgacatagaacctttttttattgacaagatgggctatctatccatcctttgaatgaataataagcattttgccttcatgtagtgtcacttcccccgcctccttcagcaattcattgctgacgccgcgggttttttttctgtaaagcgttaaatgatccacctcatacttaaagccatccgttgtaatctcgatggcatcggtaacgggaacgaagctcacgtagtgaaagccgagttgctccaggtgatatcggcccgggccgacgaggcgcaggcgattgttttcgtcgatcatgctgatcgtcgccttctcatccacataggcttcaagagaaaaaatcgtcgccacgctgtgatcccagcggctgcctgtggcgcctaaaacatgaatttcctcgggatcaagagccaacatacgtgtcagagccatttccgtatccgtctcgtctttcatgggcggaagtacttcaatgggcacctgtttttctttcagttccgccaagcgatgggagctgtcgaagtcgccgataaccagctttaatttttccggcacgtgggccaaagcgtcgtagccgctgtcggcgcagataatgccgtcggcccaacggatctcccgatccaataattccttcgacgggcgccgcccgccggtaataattaagccccgcttcataggcgttttaatgcattaatggcgacgcggggatcttcgtgtttaaaaatataagatcccgccaccaaactgtcgcagcccgcttccaccatggcggcaccggtggtttcgttgattccgccgtcgaccatgatttccaaatcctcgcgaagggtcatggcccttaactgcttcgccttttcaatggtggacgaaatgaaagactgtcccccgaagccgggattgacactcatgagtagtacgaggtccacgtcttcgagaaggtagcgaatggattcggggttttgagacgggtttaagctcacccctgccttgattcccgcttctttgatgcggtggaccagtcggtgagcgtgaatggtggcatcggtgtggaaggtaatacgatcggcgccggcggcgatgtaatcgtcgacggaatcttccggcttttcgatcattaagtgcacgtcgaaggaaatggaggtaaaggggcgaatggccttgatgaccggcggaccgaaggttaaattcggtacatattttccgtccatgacatcgatgtgaatgtaatccactttttccccgtctaaaaatgtgatggcttcacctaattttgaaaagtctgccgataaaatcgacggtgccactaacgccattttccattctccttttctactaattcgtcgtaaaagcgcaaataattttcaaagcggctggctacgatgtcgcccctttcataggcagcacgcacggcgcaacccggctctttcacgtggcgacaatcctggaacttacaagactgaataaagggcgcaaattccctgaaatgtgcgtctaaatctgcggaagcgatggagtcgatttcaatactggaaaatcccggtgtatcgaataaatacatccccttctctcccgtaaagatttccgtgtgccgcgtcgtgtgcttgccccgattggtcttttcgcttaccgtgcccgtttcgagatccaagttcagtacgcgatttaaaaaggtggtctttcccgatccggacacgccgcttaatacggtggtcttttcaaaaagcatggcttccagcttcgtcaccgattcgttgtccttctccgagagatgcatgacatggtagccgctggcttcataaatgcttcggagtgcctccgccttttcgggatccaagtcccatttagaaaccacagggacgatgcgcacgttttgttgttcgtaataagccagcattttatccaccaagtacaaattgtatttcgggtttgccgtgggaataaagagcaaaatttgatctacattggcgaccggcggacggagcaagctgttttttctcggcaaaatttcttctacggaattgagcctatccccttcgtcaattaaaagctccacgtaatcgcccacgacaggctttcgtttttgatgacgaaaaatgcctcgggcccgtgtttcatacacttcgccgttttcggcggtgacgtagtaaaaaccgcccaacagtttcgtgattctgccttttttattcatcaaaaattcaccgatttaaccacggagccgtcgacgcgcatataggctttatcgccggagcgcccttgaaccggataggataccgaggagccaccgaccacttcttcgtggttcaccacgcgttcgctgccaccggactctaccaccacttcgatttcgtgggtgtctccgtcgtccggaatgcggtaggagagatttttgtggcttaccgacgatccttcgtcgctgtcgccgccggagccatgtttgctcacgataatatctaccgttgaattttgtttaatttgatttccgctattgtattgttgccaaacgacttcgccgggtcccacggaaagatcttctctctcttccacattgcccagtttcagtccttgttctctcaatagggctttggctttctcaacggaaacaccctttaaattggggacgacggtcgtcttatcgtcttgtcctttactcatggtcacgtggacactttcgcctttggcaagcttttcgtcggatttcggcttttggctgatgatgcgatctgccggtacgctgtcgctgtattccgtcttgtctacgacgagattgagccccgccgtcttcagcgtagcctgggcctcggagatggtcatgttctcaagatcgggaacctttactttttcctcttctttggcgatgaccacggagaattgatcgccgcgccgcaagacttccccttcgtccaccgattgagataagatcgtgccgggtttgatgccctcatccgattctttctcgtctatttccagtttcaaatcatttgaagcggcgaagtctttcgcttcggaaacatctttaccgattaaatcgatcatttccaccgcttcgcctttttgaccgtcaagaagcatattttttatcttcgatccgccgaaggccaggccgaagaggagtaaaagggccagcaggaccccgcctatggttgccagtgaattgcttttctttttgggctttttcaccgggatgggccgcgtatttctctttgcgcgctccgccgtatccgtgtgtgtcgtcggctcaaccggggctctgtttccggtattgggaatcactacagtggttctcgcatccgtttgtgtccggtcgccgtaaactttacccagcaaaatcgcctttacatcttcaataatcaaactgacgttgtcgtagcgatccgaaggctttttctccgtcatgtgtttaaacacccggtccacttccggactcactctgggatttcgctccgatggcatgggaatgtcgttttgtacgtgcattaatgccacggtaatgggattttccgaatcaaagggcacgtcgccggtgagcatttcaaagagcacgatgcccatggaatagatgtcgctcctggcatcgactttttgcccccgcgcctgttccggcgagaagtaatggacactgcccatgaccgcattggtcacggtgaccgtggcatttcccgccatgcgggcgataccgaagtctgtcaccttcactcgattgtctcgggtcaccatgatgttttgggatttaatgtctcgatggataatatttttattgtgggcgatttttaaagcctcggcgatttgaatcaggtaattcaacgcctggttttgactcaacatgccctcttctttgattaattcctttaatgtctttccatcgatgtattccatgacgatgtaatagacatcttcatcggccaccgtctccatgcccacatcataaatactcacaatattcgggtgagaaatactggcggcagccaaggattctcggcggaatttgcggatgaagttgtcgtcttcgttgtattcgctctttaagactttaatggcaacgattcggtccagcctgcggtcgtgagccttgtaaacatcgcccatgccgccgcttccgattcgtttcaggcattcatacctgtcagctaaaatcataccttgcataccttcacctactcttatctagcacaatgacggtaatattgtcttttccgccaccatccagggccttttcaaccagcgtcttcgcataatcgcccgtttgtgtttccaatactttttgaatgtccgcccgctccacgacgtcggaaaggccgtcggagcagaggatgataaattttaaaaccgtatccaaactccgaatttgaaaatccacgccttgagtggtgcccaatgcctttgtcaggacatttttcttcggatgaacccgggcctcttcttcggaaatgtcgccgatgtctaagaggtaattgacgaaactgtcgtctttcgagatttgaaagagatcgtcgtcgtaaccgtatattctggaatcgccgatgttaatgtaatagagtttgcccttcagaaggtaaatcaaacttaaagtcgttcccatgccacggtattttaaatgggctgccgattgattgaagatctcttggttcacatcgtgaacgcctttatttaaaagatccaaaagctcccgctcgttttcgacggaaacggaaagcacctcttttaatcgattgacggccaaggcgctggctttttcgcctgccgcgtggccgcccatgccgtcagccaagatggcgaagcgctttttcggatccacatagtaactgtcttcgttgttttccctgccaccgatgtgggtgtaagcagaaattatcatagtatcaccttgtctttatggcctcagaacccgcttttaattgtccacagctggcctgaatatcactgcctaattctctacgtattgtacatgatacgccgctttgagacaactctcgatgaaacctgagaatgtgctccctcgacggttttttctcggaaaaatgggccgtgtcgttaagtggaattaagttcacatggcacaataggccctttgtcagtgctttcatttcccgaatgtttctcggttgatcgtttttcccctgaatcaatgtgtattccaaagtgattcgctgcttcgtctcgtcgcagtaatccctaagggccgggaaaagttcgcttaaatggtgacggttggcgataggcatgagcgcctctctcgccgattgatccgtttcgtgaaggcttacggctaaattaatgggcaagccttctttcgccaatcggcgaatgccgtcgacgaggccgcaagtagaaatggtcatggagcggtagctcatgttttttcccttagaatcgtggagaagcttcaaaaacctaagcacattgtcgtagttatccaagggctcgccgcttcccataaggatgatgtttcccgcagaaacctcttcgttttcttccacggcatagatctgagaaagcatctcgtagggcgtgagatcacgaatccggccctttaatgtggacacacaaaagctacatcccatgcggcaaccgacttgtgtcgatacgcacaggctgtagccgtaatggtatttcattaagaccccttcgacgatctccccgtcttccaattcgtaaaggtattttttggtctcatccagcttcgatgccagccgctttacgatttttacgccgcgaaggggcgcaggaagagcctgtttcagagaatcgggcacattcgaaagttcctccaaggccttacgctgaccgtgaattccttcgaagagctgggttgcacgaaaacttttttcaccgaaggtggttacataggcttttaattcctccggcgtcatttccatccaatgcattaggcatcctttcttacgatacaggccatggtaaacccgtcggtaccgtggcgatggggccagtagcgcgttcctttttcctttaatcggcactcgggatgatccgtcaaaaacgaatgaagaacgccttcattttcttccacggtgacactgcaggtgctgtagactaattcgccgccgtcatttaacgcgccgtaggcattttccagcaggcgtctttgcacccgggccagttgcaacacatcttcccttccgacgcggtatttgatctcgggctttctccggatcaggccaaggcccgtacagggagcgtccaccaaaatgcggtcatattttttcttcggcaagggcattttgccgtcccgcaccgccgtggcgatgttcttgtagcctaagcggcggatgttttcttccattcgcatcaaccgttccggggaggaatcaaaggcgtccacatgggaaaaaagctccgccatttgaaagctcttgccgccgggagcggcacatagatccatggcttccgcgtccttatccggcgtaaataagccgaccacctcttgagacgccgcatcctgaacgtagaatctgccttctttataagcagaggtttcaaaaagccctcgcggtttttttaccaccgccgcaggaaaagacttcatcgcgtcacagtgaaagcccgcttcttcaagttctgccataagggaggcaagatctacggagacggggcgaagtgttaaaggcgccggtttgaaggtggattttaaaaaatcctccgtctcgtcctttaagagttgttgaaaataaacaacccactccttcggaaagctgtaggtgacggataagcgagtcacttcatcttcgccgcgaatgtggaaggcatcctccttttggcggatcacctgtctcaagacgccgttcaccagtccggctgcgcccacatttgaaatgacctttgccattttgacggtttcacttaccacggcatgatccggcacgcggtccaaaaagtgcatttggtaaagggccatgcgcagaagctgtcttatgttttgatcgagattttcaggctttttcacgaagcgatcgatgacatggtccagaaaaagtttgttttgtaccgtgccgtaaacaatggtctccgccaggtttcgatccacatctttcaagcctttgggatcgaaggcctcttgaataaaggcgccggcttccactttttccaaagtggtcaatgcgagaaaacgaggatttctcattagtcccgtctccttcccaaggacatgaaccggagcaaggtgccgatggccgtaaggaggctcgccacataggtgagggccgctgcggaaagaatgcgctctaccccaaccatttcctcgccggataagactccgttggctaagatgaccttggcacggtgactggcgtcgtattccacaggcagggtcaataattgaaacaagacggtaatggcgaaaagggcgatgcctaatttgatcaacggctcaaaggcaaagaggccgataaaaatcaagaaaaaggaaaggttcgaccctaaattcgccgccggaacgatggcgtttctgaatttaaggggcgcataggcttcgtggtgctgaatggcgtggccgcattcgtgggcggcaatgcctaaggccgcaatggacgtggagtcgtagacgggatccgagaggcgcaagactttatgagagggatcgtaatggtcggttaaacttcccccgacgcggtccacgcgcacgtcatatatgccgtggcttttcaaaatcatttccgccacggagcggcccgtaaggccttctctattggacacgcgactgtatttatcgaagtttgtcttgattttcgattgggcgtaaagggccaagagaaagccgggaagaatgtaaatgagatagtctaaattgtagtacatgccgtacattagatttctccctcctcatctaagtgggcgccggccaagtaggaaccgatggccatgcgctttttaccgggccgttggatttcctttaagaggacggtgccgtctttggttccgatccaaagcttctttttcgtggccttgtacctgcccgttgccactgcctcctcgcttacctcaccgtcgtaaatcttcaggcgttcgtcgcggaagaggaaatgggcaccgggctccggcgaaaaggcacgaatctttctaacaaattcctccgccgtcaattcttcggcgcttaaggccaaaagttcgtcgtcgatttttgccgcataggtggccgcatcgtgatcctgttccgtaaacgtgacttcgcctttttcaagatcagcgacaaatgcacggattaaatccgcaccgaaacccgccaattcgtcgtgaatggtgccgaaatttttatcgccgatgggggttttcttaacatcatagacagcgccgctgtcaagcccggcttccactttcataaggctcacgcccgtttcttcatcgccgtttaaaatggcccattgcatgggcgccgcgccgcgatatttcgggagcagagagctgtggacgttgacgatgtgctttttcggcaaagccagaacatcttccgataaaatctgtccgtaggccaccacgacaaacagatccgcatcctgtgcccttaatttttcaagggcttcttccgtattgcaactatggggctgaaaaacttcgatgcccaaggcttcggcgcgggtttttaccggcgtaggtaaaagcttttttccacgcccttttttcttgtcttctcgggtaacgaccaaggtcacgtcgcaaatgtcgtttaaggcattgagggtgggcacggcaaaatccggtgtcccgaaaaatacggccttcatcattccttttcctcgccttctcgtgcaggatccacattgtacatttcatcggctaaatccgtatagaggatgccgtttaaatgatccatttcgtgttggataattcgggcgagaaaatcttccgcctccagggttttctcttccccttcaatgtcggtgtaattgattttgatcttttcataacgtttcaccctgcccatacgctccggcacgcttaaacagccttccagagcttcagaagagccttcttccgccacccgttcgggattgatgagcaccatcttcgctccttcgtaatcatccaaaacgatgagctgttttaatttgccgatttgcacggcggccaggcccacgccctgagcctcgtacatggtttcgtacatatcgtcgacgaggcggcgtaaatcttcgtcgatggtttcaacttttcttgattttttgcgtaatatgggatccccgtcgatgcgaatttgtaatttagccattcttcacttccttttctgttaatctatccatctatttctaaacttatggtaatctctttttccccttgcgtacggtagtaatacatcaatacccgttttaatgcctttaatagaggccgaaactcctttggccagacttttgccaaaatcgacacatgtcttttatttttaatcttcggctgctccacgggattggccacaagcatgtcgaattgctcgtgtttgttgatagcctccagggtttttttccagttcatggccacctgatccacatcccccgtgccgcgaatgtggagcttcaccaaatggacatagggcggatataaaaagcgcttgcgctcttccatttcccgatggaaaaaaggctcgtagcttcgctctttagcatattggatgctgtaattttcaggattataggtttggattacggcgcagcccttgtgcttgcctcgtccggctctgcccgccacttgagtgaggagctgataggttttttcctgggccttgtaatcggagacgaagagggataaatccgctgccaccacgccgacaaagaccacattttcaaaatcaaagcccttagcgagcatttgcgttcccacgagaatgtccacctttttctcgttcatggcggcgtagactttttcgtaattgcccttttgtgccatggtgtctttgtccatgcgataaactcgggcctcggggaatttgttttttatccaggactctacctgttccgtgccgatgccgaactgttttaaatactcgctgccgcagacgggacaggttttcggcatgggcttggttctgccgcagtagtggcagtggaggcggtgggttcttctgtggtagaccatggaaatatcgcaggcatcgcattcgatgacgtgaccgcagcttctgcagcttacgaattgactgtagccccggcgattaataaagagaatggcctgcttttttgcctttaatgcttcttcaaggccttctaccatgcgctcggataggatttcaatatttcccttaaagagctcttcgcgcatgtccacgatctccacaggcgatgcctccgtctttctcggatcccccaccagtcggtgaagctctacatcttctccgcagcgagcgtaggtaatcaccgaaggggtcgccgagccgtagatgaccttgcccccttcaaagcgcacccgcatttccgccacgtcccgcacattgtagcgcaggccttcacggtaatcgtagctttcttcctgttcctcgtcgataaaaatatagcccagctcaggcacgggagaaaataccgccgaacgcgcgccgacgacgatgcgcccaggctcttctttcagccgaatccacgctgcagctttttcgccttcggaacgacgggagtgaaggatgtccaccttcccgggaaagcgcgccgacaggcgatgcaccatttgcgtggccaggccgatttccggaacgataatcagagacgactttccatcatccatggcccgttgtgccaattgcatatagacttccgtcttgccgcttcccgtctttccgtagagaagatgaacgggccgcttcgatgaagcgattgtctcaatggatgcgatctgatcttcccgcaatggcggcgcctcgtcgggaggaatgtccttagggtccaccggggcgatggcgccgtattttattaagttgtccacgggacttgatgagaggccggttcgttttaaaatctcgccctttgaaagcgggcggtttttcagcagattgaaaaccacggcctgcttctcggtcatggggccgtcgtaatcctcacaggccacatatttttcaacgactctttttttcacgggctgtgtgccgcgaaaacgaatggcgacttttctcgcctcgattagtcggtctaatgattccgtcggaattttttccgtcaacagggcttcttctccctggaaaacagacgccgtttcctcgtcgtccattaatttgaccgccacttcttccacgccgcctaagacgtatttcggaagaagtggctgaaaggcctgcacataggatgtgacgaagatctcccgcattttcatgcccagggcaatggcggatggtgttaatataggccgcctgtccagcacttgaatgacggatttcagctccttgccttcgtccttgcccgttcttaaaaccaccgccgtctccggcttatttccgcgaccgaagggaacgatgacgcgcttgccgacaatggaagcatcctcgccctcgtaggcataggaataaagttgatcgatttgcggcaaggctttgtctacatacacatctacaatcatagtggctccatataatacaaaaaaagctagaatgttctagcttttcaggtctttctctacccggtccaatatggcggcggccaaatcacttttatccatcatgggcaactcttcgtcgctgccgtcggcggaaaaaatatgcacgtggttcgtgtcgctgccgaaaccggccttggcctcggtaatattattggccacgataaaattaaagttcttctcttccaatttcttttttgcgtaagtcgacatattgtggctttcagcggcaaagcctacgatgacccggtcccccttcatggcgccaaagtgtttggcgatgtcggggttcggcgaaaattccacggccataaggccgccttctcgcttcttgatcttttccgcggcgtaggtttttggcttgtaatcgctgggcgccgccgacttaatcaacacgtcggtggcgtcaaacttcgcttccacggctttaaacatgtcgtcggtggattccacgggaataaagtccacgcccttgggcacttttaattggctcgggcccgaaatcaaatgcaccgtcgcgcctcgtgccgccgcctccgtagcgatggcatagcccattttccccgtactgtgattgctaataaagcgtaccggatccatccgttccttggtgggaccggcggtgacggtaatatcgacgcccagtaaggttttttctgtaagggccataaggatgtaatccacaatgtcttccggctccgccatttttccctcgcctacatcttggcaggccaggagcccttccgccgtgggaagaatttcatattgttcgcggttttccaaaaccttcagcgcttcttgtgtggcctcggcgcggagcatttgcgtgttcatggccggtgcgataagaatgggcgctttcgtggccaatgccacggtggtaagcatgttgtcggccaagccgtaggccaatttggcgatggtattggccgtggccggtgcaatgaccatgacatcggcccacttggccagggcaatgtgttccacatccatattgttcaattgatcgaacatgtcgacgtgaacgacctgattgctcatggtttgaaatgttagcggcgtgacaaattttgtggcaccttctgtcatcaccactttcacttccatgccgagtttttttaatcggctcacgatggccggcgccttgtacgcggcaatgccgccggtgacgccgagaagaacgtgcttattcttcatccgccgtttcctccccttcggccatggcgagctctctgcgaagggcttcttcgcggcgctctttttccgccatgatttcttcgaaacgttccttgctggtgaattttacggcgccttgattaatttcttccagagaaatggacacggggttttccaattccgtatcgattagggtttcttcaccgtccaccaattccctggctcgattggaaaccaaagttgccagtgcgtagcggctattggtaatttttgagatttcgccaaaagataaaatgttcatcgtatcgcctttctatccacaatgtcctttttaatgttcttgtatcgcttcacccgaagcttttccgcagcaataatattttcgatatcctttaccgcttgttccaccttgtcgttgacgacgaaatagtcgtattttccgacgaaatcaagctccttaaaggcattggcaaagcgggtttcaatgtctttttcgctttcggtgccgcggttgacgatgcgttgcttcagctcttccatggtaggcggcaggaggaaaataaacacggcctctttgtatttatccttgatttgcaaagcgccctgtacatcgatttccaaaaggacgatttcgcccttttcaatttcctgaaatacaaattccttcggcgtgccgtagtaattcgtatgcacatgggcgtactccaagagctcgtcgttttctaccattttcttaaattcttcttccgtcttgaagaagtaattttctccgtccacttccattgatctcggctttctcgtcgtcaccgatgtggaaaatttcacttcgtgattcttcgccattaaagcttcgctgaccgtaccttttccgctacccgaaggaccggacaataccaataaaaatccttttgacacctgacacccgccttgtcttttactctatgtttgcaatttgttctcttaaatgatcaatgagggttttcacttcaacgatgtcgtgtaaaatccccaaatgtctggatttgctcgcgatcgtattggcttctctgaacatttcctgcaggagaaaatccaatctgcgaccgacagaacctttatcgttcattataacattaaattggtcgatatgagatatcaaacgggcaatttcttcttcgatagacattttttcaaagagcagggccagctccgtggagaaacggggcagatccaattggtattcgcccatgatttctttcacccgtttgcgaaatccgtctttttcttccgccttttccgcttcagccgccgattgaattttttccacatagctgcccaaagttgccaaatggccttccagtgcttgctttaaattcgccccttcttttttgcgcataagtaagagatccctaagggcagcgtcgaaggcctccgtgagtaaagcctcgtctaaatcaaaggcttcatcgcctccctgtttaatgacgccgggccgctccaaaagccacgccacttccccgggccgggaagcccccttttctctcaggagcgtttcataaaaagcgtaggcctcgggatcgaaacttaaatccgtattcgattccctttccgtgcgcacaaacacatcgaagtggccacgcttcgtctctttggcaatggcggatttcaccagttgttccagagcgggcgcttccgccagtcctttaatccgaatatccaaatttttgtgatttaccgatttcaccgtcacgttcagctttacgccgtccttaacgatttcgcttgagccgaagcccgtcatactgttcatagacgcctcctctatggtattatacatgatacgacccgaggacagaaagggaggtattcattgagttacgacggaacgatgacaaaggcggtggccgaggaattaaatagtcgttttaccggaggcaaaatcgacaagatctaccagccgcaagacgacaccttggtcttaaatctcaggagcaagacggacagaggcagtctcctgctctctgcttctgccaataatccctgcgcctatttaacggagaaaaaatttaaaaatccgcaaacgccgccggctttttgtatgctactcagaaagcatttggaatcgaccaccattacggccatcgagcaagtggaaatggaccgcatcattaagatcaaggtcgacggttttaacgagcttttcgaccgagtggaaaagacgctcgtcatcgaaatgatgggccgctactccaatattattcttctcgacgaaaacaatgtaattctcgatgccttaaaacgcatcaatcgctccatgagccgggtgcgggaggtgctccccgggggaagctatacgctggaaggcattgtggatcgggccaatcccctgaaggaaacgaaagaaacctttatggcgcgactaaacgaaaatgaaaacacctcggtaaagaactttttcattcgtagctacttaggtgtctcgccccttatcgcgagagaaatcgcctatcgcgccgggggaagcgacaaggatccggtgaagcttttttccgccgatgatttataccacggctttcactcccttttttccgaaatcagcgcgtctcaatttaagccccaaagcgtgtcggaggcaggccacattatcgccttctcatccgttaatttaacccactacccggaagggagcaagattttctacgacggcccttcggcccttttggatcacaccttctccgcccgcgtcttggaagacagggtgcgtcaaaagagccaaaatctaaacaaacaaatcaaaaaccatttggagcgggcccttcacaagcaagagaaaatggaatttgagctgagggatgccaaagatcgccaaaaatacaaggtctacggcgatttaatctcatccaatgcgtggaaaattgagcgcggcgccgtggaagtcactttagaaaatttttacgacgacatgaatcccctcaccatccctttagacgagacgaaagacggcattcaaaacgcagcacattattataaaaagtacacgaaattaaaacacgcggagaagcttctcgccgatcgcatcgacaaaaaccgaaacaccattcgctatttggatgccatgctctataatctggacgatgccgaatccattgacgaagtagacgccatacaggaagagtttcgggaagatttcctgaagaaaaaatacaagggccacggcgaaaacaaaaagaaaaaaaagaaagtgccgacatacctcactttcacatcgtccgacggttttcccatgtacgtcggcagaaacaatcgccaaaatcaggagctcacgctgaaatttgcgagaaaagacgatatctggttccacgtgaaaaacggacctggcagccacgttatcgtaaaaaccgacggcgaagaagccggcgaggccaccctttatgaaggcgccatgctcgccgcctattacagtcgcgcccgccagtccggccatgtggaggtggattacacgaagcgccaattcattcgtcgccatccttccaatcaaccgggccttgtcatctacacagacttttccaccatgacggtgacgccggaaaaagaaatcgtcgagcaattaaaaaacaaataagtctttcataagaaaatcggaccccgcaggatccgattttttattttgtctttttatcctcttttttctcgtcaagaaaacccaaccgcttcaaaaccaaatggtacccgtcggcaccgtaattcagcgcccgattgattcggctaatcgtcgccgtggaggcgccggtttcttgttcgatggcgtggtacgtttggtcggaaaccaaaagtttcaccacttccagacgttgagagatagcttttaattctttaatggtgcatatatcttcgaaaaaacgatagcactcttctctgttttccagggacaatatggcgtcaaataaggcgtccatgctttcactttgaatttttgaagaatagttcataatcacctcttatgaaaggccggtaatcacgccgtgggcatcgatgtccatgccgttggcggcgggaactttcggcagtcccggcatggtcatgaccgcgccggtaagggccacgataaagcccgcgccgttggacagacgaatgtcgcgaatgtgaatggtgaatccttcaggcgccccaagcttcgtgggatcgtcggtaaaggacatttgggtctttgccatgcacacaggcaggtcatctcgacccagctttttaatgcgcgcgatcatggccagggcctcatcggaatagacgacatctttcgcgccgtaaattttcttcgaaatgatttcgattttttcttccacaggcaggtttctgtcgtaaagtggcgcgtagtcattgggtgcttcgcagagggccacgaccttttcggccagtgccatgccgccttctgatcccttgctgaatacgtcggataaagccacgtcgacgcctaagccggcggccaattcgtcgatggttttaagctcggcttccgtatccgtggggaatttgttaatggcgataaccacgggcacgccgtagctcttcatgttttccacgtggcgctttaaattgacaaagcccgacttcaaggcctctacattttctgcacctaaatcctttacggccacgccgccgttgtatttcaacgcgcgcaccgtggcgacgaccacgatgcaatcgggcgtaaagcctgcttcaggcgctgcaatgtctaaaaacttttccgcaccgagatcggcaccgaagcccgcttccgtaatggtgtaatccgcaaggtgcagggccgtttccgtggcgataatggaattgcaaccgtgggcgatattggcgaagggcccgccgtgaataatcgccggcgtattttcaatggtttgtaccaaattcggcagaatcgcatctttcatgagcatggtgacggcgccggctacctcaagatccttgacgtagatcggcgcatcgtcgtagctgtagccgataatgattcgtccgacgcgcgctttaaagtcttccaagtcccgggcgaggcacagaatcgccatgatttccgatgctacggtaatgtcgaagccgtcttgacgcatcacaccgtttttcttcggccccatgccgacgatcacttctcgaagggcgcggtcgttcatatccaaaacacgtttgaatgagatttttttcgggtcgatgcccaatgcgtttccttggtggatgtgattgtcaatggccgcggcaattaaattgttggcgctggtaatggcgtgaaaatcgccggtaaagtggaggttaatgtcgtccatgggcagaacttgtgcgtagccgccgccggccgcgccgcctttaatcccgaagaccggccccaggctcggctcccgcaaggtgctgatggtagacttgcccatcttttccatggccatggcgagaccgatattggtggtggttttcccttcccccgccggcgtcgggttaatggccgtaacgaggacgagctttcctcgcggcccatcgtggtcctcaaaggcgcggccttcgatctttgccatgtagcggccgtagggctttaatttttcattgggaatgtgcaaaccttcggcaatggtttggatttcctccaaatgggcttcccgtgcaatctctacatcacttttcattttagccacgaagatcagcctccagttttttattcatctcaactacttcgtcttgtaattgttttttgtaagcgaggagtcgttctttaatggccgcatcgccgacggacagaatttgtgccgctaaaatgccggcattttttccgccgttaatggcgacggtagccacaggcacgccggaaggcatttgtaccgtagaaagaagagaatccatgcctccgccgacggatgttttccccggcacgccgataaccggccgcgtcgtgtgggcggcaatgaccccacctaagtgagcggcttttcccgcgatggaaataaacacttccgtgccggcttcttcttgctttttcacgtgatccactacttcgttgggcgttctgtgcgcactgtaaaccacgacatcgtaggggatttccaacatttttaaagcgccaatgacgtcaaaggcgatttctttatcgctatagctacccataattatagaaactttcatttgtccgtacctccttaaatcctttaccatgttatcaagagtaagtatacctgtcaatataaggagatattgtatttatctgcattcaatgccttcgcggcaagataaatgcgacgttgaatcccccatttatattgcacgctttcatttttccgccgtgcaatcggcaaatttgcttcgatatcaaaagccccatgccgtgaacgtaaacagaagccgaatccgaccgttccaggcgatccagcacctcttttttcacgccgccgccattgtcccacagggtaatgtgaatgctctcttccgtttccctgcaggccacgtgaatatctcccggctgatacttgatgctattgctgatgacattatcgatcatgcggctgaacaaatggctgtccatattgatctttgcatcttcacttaattgattgtcgaataaaatgcgtcgatcctcgtgttcattcatttgcgccacgataatttttctgagcaagggcgccggattttgcaaaataaatcgttcgtcgctgagtgtttgaagacgagaggtatcgttgagatcctgaatggttttactgatgcgcataatttcgtcttccagagctttcactgcttctttgttttcgtcggtttttaaatcattcagcccccagctaagtttcgacagtggcgttcgcacgtcgtggctgatgccgcgaatccattggctctggcttttattcagctgcacgtagcgggcattggcgtcgttaaccgcgtggtagacttcttttaaggggcccgtttcatccaagggtgtgtaatgggcactgtaaatttcctccaatgcctcttgaagggggaacaattttttgaagagattgttccgctcccttctgtacataaaaaagaggaaaaatagatagcctaataaaaaaatcagtgccaaatccacgtttaaaagccattgctctgcgctgtagtagttgaaaggcagcttatccagtgttcccttgggatacccgataaccaaaagatcgtcgccgacgatgtacgtcatgacgggatagtcttttaaataataacgggtaaagcgagccacatcggtcagtttgtacgtttccggaatttcagaaggcttttgaaaggactcaatgaccttgccttgttctccaacgcgaatggcccagagattattttcttttagaaattttcggtttgccgttgtaaaaaacagcccgtcttctttattttccatgatgtaatcgtggacactgtcaggctctacgtactgcttacttacattgtaatttatgtaaagaataagaaaaatcagaaaaataaaggacagggaaaacgcaactgtaaacaaaacgaagcggcgtaatttttttaatataaactgaaacattgttgagcccctactgctttcccatgagtttatagcccaagccctttaccgtcaccaggcgggtgggattggaggggtcgtcttccaatttttcccgcaggcggtagatatgggtgatgagtgtgttttcgtagccgaaggattcttcccacacggcgtcaatgatttgatcgatggagacgatgcggtttaagtgattggcgagaagggccaggattttatactgcttcgccgtgagtttctcttccccgccttctttaataatcgtgcccttcgccggatcgaagagggcgccgtttaaatcaatcgggccttttttctcttcgcggaagcttctgcggagcacagcttccacccgccacagaaggtcttccgcgagaaagggctttacgatgtaatcgtccgcttccgattcgaagccttcccgcctgtcgtcgatgccgtctaaagccgacagaataatcaccggcagatgggatcctcggcgcagggattttaaaagatccatgccgctcccgtccggcagcatgatgtctaaaatcatgagatccacgtggtgattggccagctgaaagcgcgcctgggccagattcgacgccgtctttacggagggatagcccgcctcgcgcaggtaggcttccaaatgatccagcagtgatttttcatcgtctacgattaaaataaccggttcctttttattcatcttctaccgcccctttcgcctctattttatcatagcgaagggcgccttcttcttttgtgatctaaaagtgatccactgtccatggtttcgttagcttcgctttttacaatgggatcaaaaggaggcttttatgagcaaactattaaccattgacaatctaagcaaaacttatcgcggcaaaaaagtattggacatcgatcacttcgatttgccgtcaggtgccatttacggcttgatcggcccaaacggtgccggaaaatccacgttaatgaagtctattttgggactcatcgaaagagatagcggcgacatggtgcttttcggcgaaaaggtcgtgccgaaaaatcaaaagacgctaaatcgcaaacttggcgcactcatcgagcgtcccgcctattacgatcatctcacgggacatgagaatctttccattctctgcaccttaaagggcatcgacaaaaagcaaattctcccggctttggaggcggtgggcctcgcagcaaaggcgaacgaaaaggtgcgaacctattccctgggcatgaagcagcgactgggcatcgccatggccattatcggcgagccgaagcttttaatcttagatgagcccattaacggcctggatcccgtaggcactctggatatgcgccacctctttcagcgattggcggtggagaagaataccacgattttaatttcatcccacattctcgacgaagtggaaaaaatcgccacccatatcgccatgcttcaaaaaggccatttgatctacgacggcaccttggaaaattatcgtcgccttcacccgccgattctttccattcgcacatcggacaatgaaaaggccgcggaggtcctttcttccctgggatgcaaaattcgcggcgaccgactgatcttaaaccaccctaccgatagcgatgtggcgaaggcggtgcgcgccctaagcccttatgtagacatttaccgcatcgaagaggagcgggaaagcttggaagccttattcattcaagacacagagaggggagagagactatgattcaaacagaatcgagaaaatacaaaggcttgggcctctatccccttctgtttctcatgctatgtgttcacgttcccgtcttgggggtcatagcatttgaacattcctttcgtcaagacatctatccccttttctctcttttagatggttactttctgtttcagttgatcttcaacccggtgcttctttcctctttggtgaaaaaagtggtggaaatcgaagaaaaaaacaatatgtttcagctccaggaaatgctgggcgtggagccgtcgacccttctcatgagaaaatggtcgtggctcagtctgcgtctcttccttcttcaattggttgagtgggcattgattcttcatatggccgcccgttccgatcattttcatttgtcccaagtggcgagcgcccacgtgaccgtggcattttgcagccagtggcttattacctcggcctttgtcgccctctttcttctattggatacgcgggccaaaagcccttactttaccctgttcttgtccatgggcggagctctttttggtattctctccatgctgacttcaagggcgctcactttcatcaatcccttcgcatggtacagctcccttttgagcatttccttcgtcaagggaagcgaaggatttcaccgcgtgatgaatcccgttccttggccatccttggccgcatccctcacgggtttattaatctgcctattcattattaaaaaacacacgcgcatccgccgcgacaaaaccatttaggaggaattatgttttctgttttttcaattgaggtcaagaaaataaaatggctgccccttctcttgaccatactcgtcgtgccattgttggcgacgtgtttcggcacctttaattacatgggcaatcgcgccatgctcacccatgaatgggaaagtttattcacccagatcgccctcttctacttctcttttttctatgtgcccctcatcgccatcatcgtcgccctcttgtggcaagtggagcataaagcgggattaaattttatccgtctcagcagcgcaaaacacagccggtttatttttgcgaaatgtttcctggcgcttgcgcttatcctcatcgcccaaatcttcttcttttcctgcttcatcctgtccggccgtttcgtctgcggcttcggcaccgtggatttttccctttatctctactacttcttcgcgagctttcttcttgccatacccgccgtctttgttttttccgctttaagcattcgtatgaaatccttaggcggcgtgaccttgttctccgtggcattgaccatggtcggatttttaacttgtgcccagcaaatcattcctttcattgaaaatgcctttgctttaaacacattggcctatgaaatgaatcatttcgcccggtttaccatacaggattccctcgtcgtctttttatttgccgctcttgagagcctcatcgcctatgcttttgccaaacaccgcttaaaatacgaataaacaaaaagccgccccagtgtttctagagtgaccccataaagttggacttaatcgagtaagcatttcgcttactcgattttgttttacataacattcgttctatgcggattgcatgcgttcacggtactctttcggactcagacctcctaa

SEQ ID NO: 48 - DNA, 23255 bp, Peptoniphilus rachelemmaiella
  source 1..23255: mol_type = genomic DNA
gcaaaactttcatcattttcgaaccaaattactctttgtttgttcaaaagatcggtgatggatggcttttaggaaaacaaaaaggagcctagttttcactagactccccaatggttgacatagaacctttatatttttccgacaagaaacttgaagggagaaaggtatttacacgagaagccatccatggtactatttttagtacaagagatgtactaaaaatagtacaaatccggggggtgaaaaggttgagttatggaagtaaaaattgaaaacagaatacgcgaatttaggaaagagaagcatctttcgcagcagaaattagcccaagctgttgggttgaagcgtcgctccatcatggcctatgaaaacaacaccatcagccccaccttggagaccgcctataagattgcgaaagtgcttgagaaagaattcactgatgtatttatttttaaataggaggaacgatgggcttattatttaatgacaacgaggcaataaaaaaagaagtggaagagaaattcggcaagggaacgaactatctgcttgccttgaaacacaacgggccggtgaaatcgaccttgaagctttttttgctgagtggtttttatacatacgatgcaaatagaaccttcgtcctcgtcttcgataagaaagggatctacgaaaaggaaatatccaattcggataaaaaggaattttacctttacccggaaagtgaaatcgaaaaatttgaagtccatcgccagacaaaaaaagccgtgattcattttcttcatatcggcaagtccattgcttacgaaataccttttcgcggacgctttttttcggagaatgaagaacaatttaatggactggagaaggtaaactggcagcaaatttaaaaggctggaatttttcaattgaaaataattaaaaaagacgagagaagcattagagtgcccaaacgatggatcaagaaatccaaatttatgggatcactcaaatatcccttcgtcttttttattgaatgcaaaagcattaaaggctgaagcgtcgtatcaattcttctacctgcgcctcatctgagccggaaagattcagatcaaaggcatcttttgaaagtgccagtgaaaagacgagcgcatcgtccacgcgtttttgatagaccctgaaatggccttcgtcgtaaacggcgtagtgcacttcaggcgttttttctctcttggccatgggctcggcttcgtcgccgaacatggcgaggacatttttgccctcatcagtaagaaagaaggcgtcgtccgcccgtttgatcaaatcagcatctaataattcgctcatgtattggcagagaaagaagtagttcatgcgcccttcgtttaaaacggcgtcataaaatgcctttcggcggggcgctccgttccaggcgtcgatggaggaaagcagatagagtttgtccgccgccaatgtgtgcagcgtttcttttttcataatatcacctacaagaattatagcaccgaaggggaaaagatgggtcggattctgatataatgaaacaatagtaaaaaggaggagcctatggaaaagaaagaattggtgttgtattccagagaagccattgcacggcgcgtgaaggaactggcgaaagaaatcgatgatgcctacgacggcgaggagattctcgtcatcggcctgttgcgcggtagcttcgttttttgttcggacctggtgcgggacatggaaagcaaaatggaaatcgactttatgaccacatccagttacgaaaacaacgaatcttcttccggagatgtaaaggtcttcggcgacttgcgcagtgaagtaggcggtcgccacgtgcttatcgtcgacgacattatcgacacgggccacaccctgaaaacagtggcggaagccatcaataaaatggggccggcgtctttgaagaccgcggtcatgctggacaaaccgtctcgcagagaggtagacttttccgcagacttcacgggatttaccattgacgatgtctttatcgtaggctatggattgaattatgggccgtattacagaaacaaaccctacatctacacctacgaagattagttttatcggcctgctctattggtgcgtcttggccgggattctgtttttgcttttagggccgttgttttcccgaagggatccttttttcggcatcgtcttcacggaagcggtggcgatttttgccccggccatctttttcaggggccgaatgggcgcccaaaagcacaggggcatggcattgggcgaggcggctcttttaaccgtggccgtttttcccattattctcgtgatcaacggcatttttttagaaggattgagccgcatctatcttttggaaaatcaaaacctcgatctgctcaggggcgatgtggggctttttaaacaaatcctcaccatggccttggcgccggcgatcatggaagaattcttttttcgcggcgtcttatgtgaacaattttcccgtcgcagcccgagaggcgccgtgattttatcggcggcgcttttcgccctttttcatttcgaggcgcaaaacagtttggcgccgttgctctttggcttggttctgggctacatctacctttacggcggtttaagggcctgtattttctctcatttcatttataatttgtcgtccatcctgttcattcactttttcaacgaacgatggatcgcctcgttttcaaaggcgggggtcgtcttgcggttagggggcataaaaaatgccaccaccctatttcttcttgtggcaagcgtcttgggcatcgcccttattttgcgcacatccatgaagcggcccctgcctcgagggaaaaaactgttgcgcaaaaaagagtggatcccctgcgccatgctcgcggtagtgtatgtaattcaattgatggtataggaggtcgatgatggataaattagcacaagcgacagaaattttaaaacacgcgaagtacgccgtctgcttgaccggcgccggcatttccacggaatcgggaattcccgatttcagaagtgatcggggctactacaccaatttcattccggaagatgccctgtccgtcggcgtgttggaaagcaatccggcgcgtttttacaaagaaggctacacgattttaaaggatttggagggcaaaaagcccaatcccggccacgtggccttggcgaagatgcaggaaaaaggctttattcacgaaatcattacgcaaaacatcgacgatctgcatcaggcggccggtgcgaaagaggtgttacaagtccacggcgacgcctccacggcccgctgtgagcgctgcaattatcgggaagattttaaagccttcgacgaacgggtgcagtcgggcgagattccgccgaagtgcccgaaatgcggcgccgacatgcgaaccaatgtggtgcttttcggcgatgccatgcctcaggctttcgacgacgccatgcgggcaacggaaaaggccgataccatgatcgtggtgggaagctccctaaaggtgatgcccgtggcctacttgccgcgaatggtggagcatttaattattatcaacaagggcaccacgccctacgaccacaacgccgatgtaattttcgacggggaagcctcgccgatcttggtagaattggagaagcgactcagtgagtgaatacgaagggtttagcctgatctacgacgccgttatggccaattacgattacgacgaggtctttcgctgggtaaaaaaagtcctcgacgaaagggagggcctcgccattctcgaaatggccatgggcacgggaaagctgacggaaaagcttaccgaccttggctcggtgatgggattcgatcgctcggaagatatgctgatgcaggcctacggcaggctctacaaaaaccccagagccaagtgggtgaaaatggatatgcggcatttttccttcagcacatccttcgacctcatcctatgcctctgcgacggactcaactatctgccgacggaggcggatcttttggcctctttcaaacaggtgcgtgcccatttaaaggaggacggccgtttcctcttcgacttaaataccgccgcccgctttcgggaatacggcgatttaaaagaaattcgcgacgaagaaggctattttatgacctggcaaaatcattttgacggccgggtgaatcgctacgccattaccgcctttttagaagaagaggacggatcctacacccgtttcgacgaagttcacgacgagtatgcatacagcattgacaccgtggaaaacgtgttgaaagaagcgggcatgaaggtgctcgccatgtacgacggctatagtttttcttctgcgacagaaaaatccaagcggatcagttttgtcgcgggaatcgacaaataaaggagtgttatgaccgatacatgtattcgtgcaatgaatgaaaagggaaccattaaggtgagtgtggctacggccacggccctggtggagaccgcccgcatcacccatcaaacctcggccacggccacggcggccttggggcgaagcttgattgccgggctactactccgcaataaattaaaaggcaaagaggagtccatgactatgattgtcgacggcgcgggacccctgggaaaaatcgtcgtcaccggcagaaacaacggtcaaatcaaaggctatgtggatcatccccaagcggatcttcccagccgcgaatccgacggcaagctggatgtaggcgccgccgtgggcttgcccggcaccttgaccgttaccatggatttggggatgcgggagccttacacgggaaaagtcgccctggttagcggcgaaatcggcgaagatgtggctcaatatttgtatcaatcggagcagattccctcggccgtcggcctcggcgtcgccgtggatacggatttaagcgtgaaacacgccggcggtttcatcatcgaaatcatgcccggtgccgacagcgaggacatcgatcatttggaaaaaacattaaagggcgtcaagtccgtgacggaacttttggcccaagggcttgatacacaggggcttttgcacgccctcttgcccggctacgatttgaaaatcttaagcgaggcgcccattgcctatgtttgcgaatgctccaaggagaaagtggcggagtccattgccgctttgcctgatttcgagatccgcgaaatgatcgaagaagacaagggctgcgaagccacttgccatttctgcaatcgccggtatcaattcgatgaatcggagcttacggccatgctttcggctcacgaggacgaggcgtagattcctttctaccccctctaaaaatttcttgacagatccgtaaagtttctgtaagatagaaaaaggttgtcgctgataaccttgcccagatagctcagtcggtagagcagcagactgaaaatctgcgtgtcgctggttcgattccggctctgggcaccatttgcggaagtggctcagtggtagagcatcgccttgccaaggcgagggtcgcgagttcgaatctcgtcttccgctccaagctcggtttataccgggcttttttcttgccaaaatacagaatgaggaggccgatcaatgaaaatcatcagaatccttttgccgctgatcttaatcggtgtgctggccgtttatgccgttcgtcgagcaaaaaagataaaggacgtgaaggatgggagcgaagaggaggccgaggatcatatggccgagggcatggccatcggcatgggtctcggtacggcggtgggaatcgcctggggcgtggaaaacttggccatcggaacctccgtcggcatgctattaggcatgatcgtcggaatgaatgtaaaaggtaaatagtccttgcgcttaaaaggactgtttactcaaaccccgatagaaacggatccgaagcttaagaaaattgacttttgttttaccgattgctaaaattatttttgaaacattggatcaaaacgagtgcgtaacgaaggatgaaagatgatggtatgaaagttctacatattttaaactatgtcggcagaggcggcagcgaaagttacatcaagaacctcgtcaatacaaacaatccttccattacgcacgaactcgtctataatatcgacggagacggcctaagtgaatttaaagaaattgggatgaagacgacccggattcctatgtgctcatctttagatttaagagctgcgattaaaattaaacactacgtaaaagaaaatcatgtcgatctcgtgcatacgcactttatgcgcgaaaacggcattgcttttttgagttcgcttctaggcatgaaggctccgattatcaatacgcggcatatggtgtcggtaattaacaagaatgcggccgaattaaatcgattattttttacgagaaatcattctatttttgccgtcagttccatcgttagagaaaagcttattgaagagggcgttcatccggaaaagatcattacgcttcctccgccttttcccctcatagaatctgacgaaattgtcgagaagcctgaaggggaaaagtggatactttctgtgggacgattatcggaagaaaagggacctcttttttttattgacgcattagaggttctttttcacgaagtggagaatgtaaaggcccttattatcggtaatggccgcttggaagaagaaacccgaaggaaaatcaaggaataccatttggaagataaaatcatgatgctgggttacaattccaaaccctatcattatttgaaatctgccgatctttatgtcaatcattccagtgaagaggcttttggcctttccatcgtagaggctgcccaatgtaaggcgcccctattgattacaaaaaattgcggggcgtcggattattttaatgaagagaacgaaagcgctttaacttatccttttggcgataagcaagccttagcagaaaaggcgtcgaaaattttgaaggatctcgatttacgagagaaacttgtcaacaatgcggagcgcatcgtaactgaagaaatcaatcgagaggcgattatagccaagatcgaacaaacatatgaaggagcaatccatggcaacaaaaaagcttaaactgttagatattctatttattcttctccttgtagctttcctcgtcgttatcgtgcaccaaaaaacgatggtccaaggtgacgtaaacgggggcaacggcataattacaatcgaagccgatgaaattgaaacaaggagcacggaagccattaaagaaggcgatgtatgcatcgataagcggcgcaacaacaccattggcaccgtggcatcttattcagtcggtaaacccatcgacaatccgtcgtcggaatataaaggtacagatgacgggcgaggggaaggaagtaatttcagatcccttcgaataaatgtggccacacgggcgaaactcggtgacgacggaatctatatcaacgggacaaagtgccttctcggcgaagaccttacgtttaccgtcggagacttgcaagtccacggaaaaataaaaaacatcgaggtagaaaatgaaaaataagataagaatatttgatgttctcatcgtcgtagcgtgcattgcatcggtcgttctctttgtaaataaaataaacattgcggaggggcgtacttcggcaaagggcggcgaaaaggaagcagagcttacgattgtcgtaccttatttggaaaaagaaatagctgagaacataaaaatcggcgctccctttaaggatgttcaacagtccattaccttaggcaccattgaatcggtagacagggaacctttagatgacgaggattttaccttcaatggaaagacgctttccgtggataaagatctttacgaaaaagtgaccattcatgtaaaagccaaaggcaccccaacggaaaaaggcattcttatcagcgagaccaattactttgtgggtcagtccaataccttcagtgccggcattgtgatgctggatcaaatcagactttctaaaatccaatattcgggtgattaaatggcgcgaatcattcaacggtttaggagtaatttagcatataatccatgggaagactcgatgattcgaaaagggctcacggctctttttggcttttttgtaaacaaactacagaaacttttggaatggcttccaaagcatagtttgcttttcagcctgttgtccttgctttcaaaacaaatcccccttgtaatgggcataggccttgtgttatgtagcgtaattcccgacggaatgtggtcaaacatatatcttctcctgatggccttcggactttggattctcggacttatgaacagagaagataaagcgaagcgacctttcgaagatttcttcgtcttatttatgatcaccattttcttggcgacggcattttcaatccatcctgccctgagcctgccttacggtttaatatatggagcggttttcgttgttttttctgtatttatcaatcaggtcagatcttgggaggatcttttaaaagtggtgattgccttagcttttgcagcgctaatggtgagcatttacggaatcatacaaaaacacgtcatcggtgtatcggttaatttatctcagacggatattagtattagtcaggaattaagcggtagagtttacagcacgctaggaaaccccaatatattaggagagttctatctcctcgtccttccgttagtcgtgggacttttcttagttcacgataaaaaagccgtcaagttgttggcggccatgacgcttttgctttcattatatgttttattggcgacggggtcacgatcggcgtggggctcctttgccttcgccatggcggtgtttatcgccttgtatcaaccgcgatggttgccgatttttttaatgatgggcttaatttcctttttctttatgccccaaacgattcagatgcgggttatgtcgattttcaataaaaatgactcttcccttgggtaccgccgctttatctacgagtgtgcatcgttgatgaaaggggactaccaatgggttggcggcgtaggtctcggcggcgacatttttcaaaaagtcttcgagagctacaaagtggaagaactttctaccgtcgcccacagccataatctatatttgcaactcgctatcgaggcgggcattttttccgtcatctttttattatcctatatggcaaaaatcgttttaaaggcactttcgagttttgcgcaagacaagagcaaaatagagggtaagaaaaaaattctgcaaatcgcctgcatatcttctctcgccggcttctttttaatgagttttgtggattacacctggttctacttcaggattgtcatcttgtttttcgccgtcgtaggcattttgtcgaatctcaatgatgcaaaagtacaattagataaagctgaataataaacattccgcctgcaccgggagatgtttagtcatactaaagcgtacaaaatccccttcaatctaagagaaggggattttttgaaaattgcacaaaaaaaccgccgaggttactcgacggtttggaggcgacacccggacttgaaccggggataagggtgttgcagacccgcgccttaccacttggctatgtcgccttacgcattgactatgtcagtataacatagatataaaatataagcaagatggatttttttggctcagaaattaccgtctaaagccttatggaccaatattctgtggtataatgaaccattagatcagagcacataccgaagggagtacttatgaaagagttacttgaaaaattagaatccggcgcatcgtctgccattgaggccgccaataccattgacgaattggaaaaaattcgcctgcagtatttcggcaaaaaaggcgaattaactcaaatcttaaaaggcctgggtaagctgccgaaggaagaacgtcccgtggtgggcagctatgccaatgaagtacgggaaaaagtgcaggcaaagctcgatgaaaaaatcgtcagtttaaaagagggcgcttacgaagcccgcatggaagaagagtatttggacgtgaccttggatgcgggcaaactccgcgtcggccatcgccatcctcttttaaagacgaaagaagaactggaagatcttttcgttgagatgggctttaccgtcgtcgacgggccggagatcgaaagtgtagaaaacaatttcgacgccttgaactcgccgaagaaccacccctccagagacaagagcgacaccttctatattgacgacaaaaccttgcttcgtacccacacctcgcccatgcaaatccgcgccatgaaagaatacggcgcgccccttcgcatcgtgagcagcggccgcgtcttccgcttcgacgacgtggacgacacccactcgcccatgttccatcaattcgagggcctggtcgtggataaaggcgtgagcttggccaatttaatcgatacattaaatgttttcgtcaaagaaatgttcggcgacgatatgcaaatcagataccgcccccacaacttcccctttacggaaccttccacggaagttgacgttacctgcctcgtctgccacggggaaggctgccccgcctgcaatcacacgggctggagcatggaattattgggcgccggcgtcgttcaccccaatgtcctcagaaactgcggcatcgacccggacgtgtacagcggctttgccttcggcatgggcatcgaccgtatcgccatggtaaaatacggcattacggacattcgcctcatgtttgaaaacgacgaccgcttcttgtcccaattctaggaggtactgaaggatgttattacccaaatcttggcttgaaaaatacgttaaacttcccggcgacacgcggagcatgtgcgatgaaatcactgccacgggcaatcacgtggaatccattatcgatcgcagcaaagggctcggcggcgtcgtcgtaggaaagattttaaaaatcgaaccccatcccaatgcagacaaattggtggtctgccaaatcgatgtcggcggcgaagtaaaacaaattttaacggcggcaaaaaatgtctttgaaggcgccgttgtgcccgtcgctttagatggcgcgacccttgtcggcggcatgaagattaaaaagacggaaatgcgcggcctgcccagcgaaggcatgatgtgctctttggaagaagtgggcatggatacatccgtcatccccaaggattcgcgggacgggattcacattttgcctgaggatacgccccttggcagcgactatgtaaaattgctggagctggacaaggaagtcatcgagcttgaaatcacgccgaatcgcccggactgcttaagcgtgcgcggcatggccgttgaaacggcggcttccaccaacagcgcgttgaaggaaaagaccattaccgttacggaaaacagcgatgtagccatgaaagatgcctttaacggcctcaatgtggaaacggaaaatgcgccccgcttctatctccgtatgctcaccgatgttgagatcaaaccgtcgccgcaatggatgcaaaacgacttaatggccgccggcgtgcgtcccattaacaacatcgtggacttaaccaattacgtcatgttggaatacggtcaacccctccatgcctacgatctggaccatttaaaaggcaaggaaattcacgttcgcatggcaaaggacaaggaaaagatgcacaccttagacggcaacgaacacattttatgtgaagacgacatcgtcatcgccgacaaggaaggcattatcggtctcgccggcgttatgggcggcgacatttcaggtgtcagcgaaacgacgaccatggtcgtgttagaaggcgccaatttcgaagccgatcacattcgcaagacgtcgaaacgccaagacctccgctctgaagcctccagtcgtttcgaaaagggcttggacccgaatatggcgaaagaagccgtggatcgcgtctgcgaactggccgttgaaatcggcgcggcaaaagtagctaagggctgcttcgaccactatccgaaggaagtcgctccctggacggtggatgccaaggtaagccgcatcaacgcccttttgggcacggagatttccggcgaaggcatggtaaaaattttggaatcccttttgattcccaccaccctcgacggcgacgtgcttcacgcaacgatccccactttccgaggcgatttgcatatttgggaagatttagcggaagaagtgggtcggatttacggcttcggaaacattacgccccttcctttaaagggcaccttgacccgcgggggcaagagtttgttccgccgggtacaaaagcgtgcggaagacgtgcttctcgccgccggcttcgacgaatttatgacctactccttcatgggcccctcggccttcgaccggattcaactggcggccgacgatcccctgagagaagctgtgaaaatctccaatcccctcggcgaagagtactccattatgcggaccacccttctccccaatatgttggatattttcgtaaagaacatgagctacaaaaatccctcggcctacggctttgaattcggcaatgtgttctctgtcgacaaagatgccgacggcctgcccaaggaatacatgaagctcgccattggcttctacggcgaagaagatttctactacctgaagaaaaccgtggccacggtgttaaaacgcctcggcatcgacggggtgcgcttcgtgcaagttcaagacttccccctgttccacaaaggacgtcaagcggaagtttatatcgaagacgaatgcatcggccgcttcggctgcatccatccgaaggcccaagcggatttagggatgaaacaacctgtttatatggctgaattggatttctcgaaaatcgtagaaaaagccaaagacattatcacctacaagcccatcgcccgcttcccctccatcgaacgggacttggcctttatcgtagataagaaacttgcggcacaagatctgcttgattatgtggaaaaagaaggcggcgaactgttggaatcggtggctgtctttgacgtttacttcggcaagggcatcgaagaaggcaagaagagcatcgcgctgaagcttgctttccgccacgccgaccgtaccctaaaagaatcggaaattgcccacattgtcgacggcattattgaaggaattgaaggacagtttaacgccaaattacgatctgaataagaggtgtaagatgacaaagacgcgcgtacaggttgaaattgcaggcatgacctttcacgttatcggcgaagacgacgagacatacgtcaaggcgttggcggatgaggccaacgagcgcatccgagaagtggaaagccttaactaccgcttaaacgacgtacaggtttatattttaagtctcttaaatgcgttggatgaaaagaacaagcaggcccgggctcaagaagccgccgatgccttggcgggagacgcccaaggggtgaaggaaaagcttgaagaaatcgacgcgctgaaaaaaagtctgaaagaaaattccgatgccctggcagcaaaggacaagaagcttcaagaatcggacgctcgcctaaaatcgttagacgatgaaaagaaaagacttgagcgagaaaaggcggctttaatcgaagaaaaagaatccgctgaaaagcaattaagtgaacgggacgaaaagattcgcgccctggaagaaaagaattacgaaacgcaaatgcgtcttgtagatctgaataaagaaatttacgtcttgcgcggtgaccatgaacaggaataatctggaactgctggcaccggcgggcaatatggcgtctttttacgcggccataaacagcggcgccgatgccgtctatcttggcgggaaggaattttccgccagagcaagtgcacagaatttcacggcagaggagatggcgaaagctgtctcctatgcccatgtcaggggcaagcgcgtcttcgtcactttaaacattttgctttccgacgaggaatgcgagcgggccttgaattatgcggcagatctctatgaaataggcgtagacgccttgatcgtacaggacatcggctttgcggagctggtcttaaactacttgcccgattttgaactccacgcctccacgcaaatgagcgtcatggatcttgaaggcgcccgttatttggaaaacatgggtttcagccgcgtggtggtgggacgagaaatctctgccgatgaaattcgccgcatcaaagaaggcacggaccttgacatcgaagccttttgccacggcgccctttgcgtctccataagcggtcaatgcgaaatgagctcttacatcggcgcgagaagcggcaaccgcggcaactgcgcccagccatgcaggaaacagtacaccatcgaggacgctgagggaaatcccgtctacgacaagggctatgtcattagccccagggatttaaataccatcgcgtttgtggatcgactggcggaagccggcgtctattcctttaaactggaaggccgcatgaaaagcccggaatatgtggcggtggtgacgagcaattacaacaaagccttaggcggcgaggattttaaaatcgaagacatggctcaaatgtttaaccgctcctacaccaagggcgtgggcttcggcgacttcggcaacagttttattaccgagtcccgacccaatcaccgcggcgtgaaaatcggcgtggtagtaaacggcgatgcccaacagggcaccacggtggattggaagcgagaacccgacgagggggatctcttggaatttaccgtggcgggagaaaagaagcgccacacgtttgcaggcaaggcggaagaggccctgcaccttccctttgtgcccgatgcgggcaccacggtgcttcgcctttcgtcggtgaagctcaacgaagccgccgggagggaagcggaagaaatcgcctacaaccgagatattgaagggcatttctacgcccacatcggcgagttgccccgtttcaccttaacgggcgatcaccgggctgaggccgtgggagacgatcccctggagcgagccaaaaaagcgaaggtgaataaggatcatattcgccaaaaccttggaaagttcgacggctccgtctacgcattaaaagatgtgaagctggacgtagacgacgatgtcttcctgcctatttcgacggtaaacgacctgcgtaggcgagccctggccctttacgagaaaaaagaccggcgggtgcgtccgagtttcactttttccgaaagctttagaaaaaaagccgtggaaaataccttgctcaccgtggagatctccgaggaagcggcgatttatgacttgccctatggcgtcatcgatcgcctggagctgtattttctgccgtcaatagaagccatggactttttaaaaggcgtggacgtgccggtttactacagctttccctacgaaacgccggcaggctacgagaaaataaaaaactttttcgatggcggcatcgttcaaaatctggggcaattcgaagaagtggcgggcgttgccgtggcaggagaagggctcaatgtctttaacagttacagcttccgccactttcaggaagctgagagcgtcattccgtctttcgaatgcaaaaggcagcaattggaagccctttatcgccgctttggcacctgcggcgaaattttatactacggctacccccgctccatgaccatgcgccattgccctatgagtttggtcaaaggctgcggtgtaaaccgccactgcgacacttgcgccttcaggaaaaattacaggctaagagacgagcgcaacgtcgccttttccttccgccgcataggcgacatgacggaaatttacaacagcgtccccatttacctcggcgaccgggcgaagtccgtcatggccatgaatccctcggcgctgaaaattcgcgggcgcatcggcgaggacttaaataaaatcattaaggaagcgagccgggtcatcgaaggaaaggccgtaaaaaaacccgtggtcagtgaatttacccgaggtcattttaatcgcggcattatttaatcgcgtaagcatagagaagaggaggaggcatggcgcctaaaatcgaagccattcttgaatttcacgacattgtcgaacaattaaagagtctcaccacgtcgagcatcggcaagaagcgttgcgaaaccatgaagttttccgccgatcccgaccgcatcgaacagaggcaagaggaaacgcaagaggccctacgcctcttggtggaacgatcggccccccccttgtccggcgcccgccccgtggcgaaaagcgcccactacgcttctcgcggcggcgtgctccatattagcgagcttctggagatcggcgattcccttcgcggcgtcttgcgcatgcgcaagtacatggccgtcgtagacgagtctgtagaagatccctacccctctatacgggccatggtatcggccctgtggactcagggcgatctcagggagcgcatcgaggccaccatcgaatcggaagattccatttacgacgacgcctcgccgaagttgaagaccattcgccgcagcctggcgcgaaaaaaagatcaggtgcgagacaaattacaggccatcttaaattcgcaggacctgcaggaatccttgcaagattccatcgtcaccatgcgggaaggccgctacgtggttcccgtgcgccacgacgctagaagcaaagtcaagggcttggttcacgacatgagcgcctcgggccaaacggtctacatcgagcccatggccattgtggaggcgaacaacgagatccgtcagttggagctggaagaaagggaagagattcagcgtattttagcggaactttcccaagaagtgggccagtacccggaagcctttgcggaaaacgagcggctcttcggtcagctggattttatctttgccaaggcgaaattggcctcggatcaaaacgctattcgtccgaaactttctaagtctcggatcacgaagctcgttaatgcccgccaccccttaatcgatcgccacaaggtggtgccattgaatttggaattaggcggcgagaatcagggcctcatcattaccggtcccaacaccgggggcaagaccgtaagcttgaagaccttgggcctcatggtgctcatgacccaatacggcctgcacattcccgcagacccggggactaccgtgggcatttacagcggcgtctatgccgacatcggcgacgagcaaagcatcgagcagtccctctccaccttcagcggccacatggtgcacatcgtggatattttacaaatcgtggatgaaaacagcctggttctcttcgacgaactgggcgccggcaccgatcccacggaaggggcagctttggctttgagcattatcgaacacctaatggccaagggcgtgagctttatggccaccacccactacacgcagctgaagctttacgccttaacccgggaaggcgtgcaaaatgcttccatggaatttgacgtggaaacattaacgccaacctatcgcctccacgtcggcgtgcccggcaagagcaatgcctttgaaatttcttcccgcctcgggcttccgaaggaaatcttagagggcgccgaggactttttggaaggcgaagacattgcctttgaagacgtgctcaccaccctggaagcggaacgcagccgtctggaaaagcgcgaagcggagctggtacaacttaccggcgagtataagcgggaaatggcggaggcgaagaagacggcgaatcggctgaatgccgagaaggatcagattttgcagcgcgcgagagatgaagcccgccgcatcgtaaaatccgctaaggaagatgcggacctcgccgtctccgaaatacgggatattcgcgagcagctgagaaaagaagatgcccaaaccttgcaacaggctcaggatctattgcgtgaagggggcaaaaagtaccgcgacaaagacgagggcatcgtgctgaagcgggcggccaagccggccaaggccctgaagccgggagacgaagtctacgcggagtccttgggcgtatccgccacggtgctggaagggccagacaacaaaggcgatgtcctggtgcaggcgggcttaatgaaaatgaccttgcccgccgtgtccttgattcgcagcgagcctcgggccgtgacggagaaaaaagtcaacgcgtcgaaagtgcggcaaaagaagcaaaagcacgccaaggtagaattcgacattcgcggaaaaaccttcgaagaggcggagcccattttggaaaaagcattagacgacgggtatttagcttcccttgatcgaattcgaattattcacggaaagggaacggggatgcttcgcaagaaagtaaaagaatacttgcgccaccatccctcggttaaaaagcaggaagatgccgagccggcagaaggcggcagtggcgtgaccattgcatacttaagataggagagactatgatcgattttaaagaacaaattgcagacgggctggctcgggaaacagggctggataaaaacgaactacttttaaaaattgaaacgccgccggacaagaagatgggagactatgctttccctacctttaccctggcaaagaccatgcggaaaaacccggccatcatcgcccaagagctgaaagaaaagcttgaaggcatggaaggcatcgcggaaattgccgttgccggcccctacttaaacttcttcatcgacacgaaaaccctggccgaacacgtgctgaaagccgtggtcgaagaaggggatcgctttggcgcatcgaatctcggcgaaggcaaaaccgtcatcgtggaatactcttcgcccaacatcgccaagcctttccatatcggccacattcgcaccaccattattggcgatgccattaagcgcatttacaaacatcttggctataaggtcgaagccattaaccacttaggggactacggcacccaattcggcatgatgattgaagcctacaaacgttggggcgacgacgaagtcatcgagaaaaatgccattcccgagctggtgaaactttacgtgcgcatcaataaagaagcggaagaagacaaggaacttctggacaatgccagagaatggttcagaaagctggaaagcggtgacgaaaaagccgtctccctttggcaatggttccgcgatttgagcttaaaagaattcgagcgagtttacgacatgatgggcgtgtccttcgattcctatcgcggcgaatcctattactccgaattaatggtgaaagccgtagacgaaattaaggaaaagggccttttagtggaagatcaaggcgcacagattattaatttggacaaatacaatttgcccccgtccattattattaaaagcgacggttccaccatttatctgacccgcgacattgccacggccattttcagaaaagaacactacgacttctacaaaaacatttacgtcgtaggcagccaacaaaatctccatttccaacaactcaaagccatactaaaagaaatgggctacgactgggccgacgactgcatccacgtgccctttggcatggtctctctgccggaaggcaccctctccacccgcaagggcaaggtcgtctatttggaagatgtcctaaaccgcgccgtagacaaagtggaagatattttaaaagaacgtgaagaagcgagcggcaagaaaatggacaatcgcgacgagctggcccatcaagtgggtatcggcgccgtgaaattccaagagctcttcaatcaacgaatcaaggactatgtctttgattgggaccgcaccttaagcttcgacggcgagaccggcccctacgttcaatacacccacgcccgcatgaactcgcttctggaaaaaggcggcttcaacgtaaatgcgcccgtcgatgcatccctgctcaacacaaaagaagaaaaggaactcttgcaaaaactttacggcttcaaccaagtgatcgtcgacagccacgaaaagtacgaaccctatttcgtgacccgctacattacggattgtgcgaaaattttcaacaaatactacaccaatacgcccattctcgtcgacgacgacgcactgaaacaggctcgcctgcttttggtatacggcgtcaaaaacatgatccgcatcggtttggatctcttgggcatcgaagccccggacaaaatgtaagaaagaggcgaaagcctctttttttatggaggaagaatgaacgctttactcgtcgctctaaacgccagctacgttcacacgaatctggccgtacgcctgcttagggagtctacgaatcggcccgtaggccttttggaaatgaccattaatgaatcaaaagacgttatgctgcaaaaaatccttcgggagcggcccgacgcgatcctttactccgcctatatttggaattgggcgcagatcgacatgctgggccgctacattaacaaagccttttccgaaatcaaacaatacgtcggcggtccggaagttacctacgacagcgtggagcgcatggaagaggcaacctggatcgacggcattttgcgcggcgaaggggaggagagcttcgacgattttttagcctatctcgccggggaatctgcggcagataaggtggcggggcttgtgtaccgatggggcgataaaattcaggcgagccccgtgtcggttcccttttctatggagggccttcccgccggctacgaagcggaagacttgaatcatcgcatcgtctactacgaatccatgcggggatgcccgtaccattgcagctactgcttgtcttccgaagacgatgtggtgcgctaccgaagcgtggatgaaatcaaaagccatatgcgtccaatctttcagacggggaccaagctggtgaaatttgtggatcgctcctttcacattcgccccgcgcgcaccaaagaaattctgcgcttctttatcgacgaagcgccggagggtatgtgcatccactttgaaatgaatttggaacacatgagctccgatgtggcggaagtcattaacgctgccccggccgggcgctttcaaatcgaagcggggattcaatcggtaaatcctgaagtgaaccgccgcatccatcgaagcacgaatctggataaaatgaagcgcgccatggacatgatcgaccgggagaaggtgcacattcacgtggatctcatcgtgggccttccgggagaagacatggagagctttcttcatggctttgatcgggtcgtgcctctcggggcgaaaaagattcaaatcggctttttaaaattgctccgtggcacggaactgcgccggcgggccgaagaatttcacattgtctacgacgaccagccgccttatgaggtgatccgcaccgatgttttagacggaaacgaagtgctcttgcttaaaaattttgcgaccatcgttgaaaactactacgacgaagatgcctttctcgccgtgaaaggtgaagtcaaaaagcgcggcctgcgtccctcggagttttatatggccatggcccgaaaattggagaaaaccattcaccgaatgccgcttaaaaatcgcgagggcaagtatcgctttctctacgaatttttgaaagaagaaggctggttagatgaggccatgtattcggccttaaaagaagatttctactttgcggaaaatcggtacatcggcggcgttttgcctgtcgaagatcccgaggtggatcgtcaatccgtcgtagactacctgaaaaacaatccggccctggtcccggggcgggaccccctcaaagcgtcgaaacacgtgcggggcatccacttgcccgaccgcgtgcgctacctctattacgaaaatggaaaatacaaacaccataaggatgaaaggaaggaccatggacagtaagaaatacttaagcgactggtacgatgccatcggttttctggaacagattcctgggcgggagaaaatactggatggcgcccccattcccatgttgcaaaaagacctggtgcgggaaatcaaagcacaaaaaaacgacggaaccatggattaccgccatatatttaccgctctgtgcgtcgtcgtcgccttggatcaggaattcccctacgccgacatctatctgaaatttttaaaagaaaacgaagaagacgccattcgcgccatggatcagcagttggcacaggcactgaaagggcaagagaccgaatctatctatttaatggctcgagccaaagagtgcgtgcggggaaacataaacgatcgcctggagaccacctacgccatggaaggcatctacaaccaacattttcagaagggcgaagacctcagtgatctcttaaaagaaatcacccaacgctacgaagccattatcgaggaagacggaaactgcgccgaagcctacgccgccctcggccgcctctacgaagcccaggccctatacattaaggcaaagttttacgacgaaaaagcccttatcctggccgaagacgatctcttgaaagaacaaatgcgtcgggccctggagcgggtggaggagcctgcggccatcgacggagcgaagacctatttgcactacggcaaatacgaagatgccatacgcaccattcaatccctcgactcccaatacaccgagcccgccatctgtgcccacattctcggcatggcctactacggattgggggacatggataaagccatcgctcttctgaaagacgcggcatcccacggcgaggacggcgaaatcgaaaacgatctggccattgcgctggccgccgcaggtcgtgagaaagaagcggtggacatcttatcgaaactcatagggagagaaagtgacaatcgcacggcctatatgaatcgcggaattctctactatcgagaagaggcgttttcagaagctctgaatgacttcgaaaaggcataccaactggcatcggatcccgatgtttgggcccttatcgagcaaacgcgaaagcttgcagattcgagtaaataatgtggaaaatagatgtaaaaatcatattgacaagaaaaagggacctgcgtataatataacttacctatttgagcgaacgacactcgcgagagaaaaagttcaaaaagtaggttgacaaaagtcgccgatacatggtagactatacaagttgtcgcgcaagacacgtcaaaaaactttttacaaagatttaaaaagtgcttgacaaaaagtcctctgcgggatatactaaataagctgtttcgaaagacacagcgctgaaccaagttaattaaatggtataagagattaaaccataacaatctataagcttaaagcggaacacagtcagtggatccgagctaagcaaactcagagtttttattgagagtttgatcctggctc

SEQ ID NO: 49 - DNA, 23212 bp, Peptoniphilus rachelemmaiella
  source 1..23212: mol_type = genomic DNA
gcgtaactttcatcatttccgcacgaaactgcttttcgtttgttcaaaagataagtgagtgagggtgtgtaggaaaacaaaaaggagcctagttttcactagactccccaatggttgacatagaaccattttatattgcttgcggtaagagaaaatcagttgcatattgctttggcggaactgcaagctaatataagtcctgtcattgtaactatggtaaattctttagaaacgtatgatacatgggaaaagatttgcggaaaaggacgtatcctccctgcttttccgggtgccggcggcggctttgacggagatattttggatgcagcccttatgcctcgctttattcagccaactacaatcggcatgtcaggtggtcgtgagaaagaactgttcgatttgttccgatcggcaatgattccatgccaagttgtaaaagacatgcattcatggcagatctgtcatcttgcaatggtcgtgccgattgcagatgcttattatcattcagatgatcctgagcatgccggaaacgatcgtgtattaatgaataaaacagcgaagcaaatcagaagaaatctttttaatgttaaaacaaaaggaattaaacttgttccgataaaaatgaagtttttacaaattcttccatgctccattatggggtttattcttgggattatttttcgaagccgttttggagaaaagtttatgtaccgacattcaataaaggctccggatgaaatgaggcggttgcatgagcaattttataactatataggtatttatgacgtatgaaccgataagtgtttgtagttttttatgcttttctaaaagcatactggatgttttttctcaagcatccttccctttgacaacttccatcgtgcaacgagcgtgcagaccaagttcttgatgtagtgttatcatcagggtagtcttgacacatgtggaagctatagcgttgatacaaaagatataaacttagaaatcctgcatttcaagcagttttataagcattttgtctttgatagagatgaagaaggatacgtcaaaaagactcaaaaaaactacatggatgtaagagtagttttgaggctggtatgaggaaacacaaaaaatataattaactcattttgtactttctataagagtagcataaaagctgctttttttttattgaagggagtaaggattcgttacatccttttcaaaatataaaacaatcacgagccaactttacatattcgcttttataacttataataaaagcgtaaatgagaggaggcggactatgaatacacttaaagagtatatacaagaaaatttaataatcaccaacaaagaagcagaagaactaggatataccaggcataatttatcagaattaacgagaattggacaattagaaagattaagaccaggactatatcaactaaaaggcaaagtaatagatgattttgttcaaatatcatcaaatagaaatcgaattatattttcccatcaaacagcgctctacctctacgacctatccgacagaactccaaatgtatttcatatatctgtaccccaaggctacaatgccagccatatcaaaaagagatatgaggatctacaagttcattatgtaaaaaaagatttatacgaacttggaaaaacagaaataaaatcaccgcaaggcaaccttattccagtttacgatatagatcgaaccatttgcgatatcataatcgacagagaaaaaatagataagcaaatttttacagaagccataaaaagatactttaaatcacaaaataaaaatctaagacgactcataaaatacagtagactatttaaaattgaagatgaaattagaaaatatatggaggtattatcgtgattaatatcgagagtataaagggtaagataagaagtcttgcagagaagaaaaatctaaagtcgcaagaagttctgcaaatatatttctttgaaagatttttagaaagactatctaaatcacaatacaaaaacaattttgtaataaagggaggatttcttatatcatctttgattggcattgaaaacagaacaactatggacatggacacaaccattaaaggcatagccctaaaagaagaaaaaataaaagaaatcgtagatgaaattataaatatagatgtcgatgatggaataaaatttgaaatgaaagatatctcttatataagagaagaagatgagtacgaaaactttagaatttcactaacagcaaatgttggtaagaccaaaaaccctatgaaactagacctaacaacaggagatgcaataacaccaaaagaaatagaatacacctatccatgtatctttagcaaagaaaatataaaaataatggcatatccattagaaacaattttagctgaaaaatacgaaaccataatcagaagaaatataacaacaacacgaatgagagacttttacgacctatacactctctacaaactaaaaaaagatgagatagattataaaattttaaaagaagcaatagaaagaacttccgacaaaagaggaagccatgatgaaatgcaagactatgaggaaataatcgaggacataaaagaagattcatacctaggatccttgtgggaagtatacctcagtgaaaataagtatattggagatctgaagtttgataagattgttgatgtagtgacaattatttcaaatagggttagtgagatgtaattcaacagacactgtttggaatattacagacgagaaaatattaagtatgagaagtggaattaatctacttcttttttaatagcttgaatttacaatctaagtgcaacaaaaaatgattcaccgttttctggtaaaattatgtcgacgaaaaccaatcaaccaggaggaacgatgaatcattattctcattttacactaaaagagcgtgagttgctaaagcattatatggatattggcctaaatcaatctgaagtcgcaacaaagttagggcgcaacaaatcgtcaattatccgtgagttaaagaggaactctgtagaaggaagttatttaccttgtgacgcacaggcactttatgccaccagaagaaaagcttgtcgccctcataagaagttggacgataccgtccttttccaaaaggtaaagtcgttattcttagagcatcagtggtcgccggaacagatcgctgcccgtttaaaatacgaagagagtgtttatagcattagcttcactacgatttatcgagccatttattccggcctttttgacgagccgaatctctctaggggcaatagaggatgcattaggaaactaagacatcgcggaaaaacaaggcatacgaaatcctatgaagaaagacgcggtaaaattccaatcaccaatcccatatccgatcgaccggaggcagctgaaaaaagagagcgcttaggtgaccgggaagcggatacggtggcaggtaaaaccggcaggacatgcctactcacattgaccgaccggaaaagtcgctacctactttgtcagaaaattccaaagaagaacgctcaatgtgttaagcaagccatgattgaactgttgaaggatgaaccccttcaaagcattactcctgatagagggaaagaattctcaaagcatcctgaagtctcccaacaactgtctctagttgagttctatttcccactgccccatcatccatggcaacgagggaccaacgaaaatacaaatggtctattaagagaatactttccaaaaacgaaagatattgaccaatcagatagctatattgaagcgaaaataaaagagatcaatcgtcgcccgcgtaaatgcttaaactggaaaacgccctatgaagtttaccattcagtggagttgcacttgacttgacaattcaaggttttaaaaaacagaaataataaacatctaaatgattttgagagaggacaaaggaagcaacgaaaaatatattggactgattcgacggttcttgcccaaaggaaaatctctaaacgactatgatagccgacattatataaaaatcatggaatggatgaatactttgttaagaaaaatcctagattatagaactcctttagaagcatttgcggatgagttaaataaattagaatggatagatgaattagttcaatttgatattgcaatttaggagaaaaatattgtagcgagaatgtttcatttagacttgcaattagcgagaaaagtagccgaacaagctgagtttgataaattttgatttatagggtaaaataaaaatatataaatttgaagggaaagtgtagtgaataatcattttaagaatcatcctaagaacaaacttaactctgtacaaatgaaaccgatgaaacattgtacagagtatagcaaatagattgcatttaagatttcatcgggaaatacaagaaattaggtcatgtagttggcttcgtttttgtacacatttctcgatatgtaattaaaatgtaaagggctataggcaatgttttgtctgtagccttttgttttataaattattaagcaaaaggcagatactattttgtatttatgccttttttgttgcataaatactgtaagttataaattgagaaaaggatgatgattaaatgaatgaaaatagaataaaaattttaaatgaagaaaatattgataaagcactttttaagctaggtattcctatggttatcagtttattggtagctgctttatacaatgttgtggacacctattttgtgtccagtcttgggaaagaggcagtagctgccgtttcagttgcgtttccaattcaacttatctttttagggataggattaacatttggtgcgggagcaggctcttatatatcaaggctacttggaggaaataataaaaaagaagcaagtattgtagcaacagttgctcttatatcaagtgcaattttagggataattacagctattgcattgttttgctacttagagggcgttttgaaatttatgggagccataccctctattattgaaatttccaagtcatatacaggaatattcatagtaggcggtattttgggaacgataaatgtaacacttgggaatttagctgttgcacaaggagctgctaaaatttctttaaaggctatgattgtaggctctatatcaaatttgattttagatccgatattcatattcggacttaatttaggagtgagaggcgcagctattgcgacactaatagccagagttataaccagtctaatgtatctcatttactttgtaggagataaaaatttaattgagataaaattatctaacttcaaacctacacttacaatttataaagaggtattgaatatgggaatttccatgttattacttcagattttacaaactatatctataagcaaaatatcctatgcagcatccttttatggagaagaagcaatagctgcgatgggcattgttcttaggattgtaacattaggaacaaatgttgtattcggatatatgaaaggactacaaccattagccggatttaattatggagctaagaattatgaaagagtaagagaggctatcaaggcaagtattaaatggacaagtgtattttgcatagtttggacgctaataatttatgtgtttgcaccaagcatattatctatatttggaaccgatgaaaatgtattaaatatagcagtgctggcattaagagcaggtgtcattatgtttataacatttggatttcagtttacctactctaccttatatttgtctatgggaaaggcgttagggggagtatttctaaattcattaagacagggaataatttttatccctatcattttattgttgcctaaatttatgggactaaatggtgttatatatgcacaaacagtttcagatttgataacaactataataacaataccttttgctattagtattcataaaagtttgaaatcggaaattaaaagtagtatttaaatctggacttgaggttgaaatacaaaattgacaagccttcaaagtatatataattagattaacagaacccgacactactcttaaaatagagtaagtcgggttttttgattgcgaaaaattagccccatcacgtatgataagagctcattccatatatattgtatcctagatacagaaaaataaacgaccaaacacctgaattaaaaatagacaaacacttgaattatacgtaaaattttgcttaaagcattaaaagtatacttaaaaatatttacgatctggaattaattataaatagatttgaacttaacaagaataaattgtatactaaaattagtttgagttccaaaacggaaatatatctaaataggaaggacataaatgcatgataataaagcgtgactattatttggataaactgagtggagacggtagctctattgtccaaactcgatgtcgataagcatataaatattgaaattgagctggatgagcttgatttgaccagtgtggagagcaaagcaacatatgctcaaatcaaagaatatgtttggaataaatttgaattaaaagtttcgacattatatattgcacagataaaaaggaaatgtggaatagaattacgaaaacattacaacaagtctaaaaaggagaaacaaattattccacagtgtacacctgaaaaagaagaagccatcatggatgccttgagacacttcaaaatgattgaatagaaaagaatgacagcctatgactttctgcatttatgacattcctacttggtataggaacagctattattcctctcttacgaggtatcaattagaaaataggctcaatataaagattgataggatcctttttatatttaaaggagcgttgaaatgattgataaaagtaacaaaaaattttgggatagattcgccaagttgtatgcttcttttatgaagaaggataaaggtttttatgataaagtttgcggatacataaacccctatttgagtaaggatatgaatgtacttgaacttgcttgtggttcaggtcaattatcccttaacctttcaaaatatacgaaaagttggattgcaactgatttttctaaacaaatgatttttgaagcaagaaaacatggagaatacgagaaccttgtctttgaaatagctgatgctacttcattgatttatacagatgagaaatttgattgtgtagtaatagctaatgcacttcatattatgcccgagcctgacaaggcaatgaaagaaatatatagggtgttaaaacctaatgggactttattcgcccccacttttctatggaaggagggaaagcaaagaaaaatgataaaaaggttgatgtctattttaggatttaagatgtatcgagaatgggataaaaaggaatttgaagattttattgaggaatatgggttttcagtagctgaaatgaaattggtaaatggaggtcttgcaccagttggtgtaatgattgcatataaaaagtaatattaaattattatttacaaggtaatatgaatttaaaagcaaaagggagatgattttatggatttaatacaggcaattcttgtcggaattgctatagcagctatttttaacggtgcagtggcttctttggtacttattaatccaagattctttttggattcttatccaaaggctatccaaaaaatagctccgaaacaaatgacaaagcaagagaaaaagataaacatgacacttactatcattattgtgggaatttgttttatttattcaacaataagcattttacattcaggaatcgttggcttttggaatatattttggatgggatacattcagtggagcatattaaatataggagattttttgttattggattgtctcttatttcaaggaaaatataaagaaaagatagttattccgggaacagagggacacaaagattatgagtttaataattggatgaaacatttggcaattcaagaacattttttattagttccattttttcttgtaccaattatagctacaattcaagctttgtttgttggctttttaggaagataaatttagaattgcataaacaatttaataatttgataagagataccataagaacagtaaatcaaatcggtttactgttttttctttgctcaaaattagaaagaatggtgcaacatagtcaagtatatggacacaatttttaaatacttctttgcagctacacgataaatatcatgcaaaatagccgaataaaaaaatgatgagtgaaacaaaataaagatgatcgaccttataaaatcaataggttttgtgaataaaggcgcgacggtgggagcaggtgcttgatcgcttcttccaagtctcgtagcatggcgagagtgtagtattgatgtcaagaacgaagtaaaattaagaaacccttgccactgaacttgatcgtgaatttgtcacaaagtttactaaagagtttatggaattatataatgggattcattttaaaacgaagacaaattagaatttgtagaataggttgtttatattggcttaaaaaagcagcattgcaactgttggttgacatatttccaaggtggcttggtagctatgaaaccgattggtttgatataactaaactataaaagagaggagtgtacgttatgaacatggcagacagaatacagtatttgagaaaaacaaacggaatttcacaggaggaacttgcaggcaaggtaggagtatctcggcaggcggtttcaaagtgggaaagcgaacaaagcttgcctgatttggaaaaaataattgccatgagtgattacttcggagttacaaccgattatattctaaaaggaattgaaccggttgcagataaagagcagaaaagctctgagctaaaaagcaagatactatatatcgcatcaacagcatttgttgcgattgggttatttagtgcttttgcaggctggtatgaagcgcaaaccatgtataccgtatggggttcaatgattattcaggccgttggaattgccggatactttatagggcggttactctctgtagcaaggccgcctttcgctgtcaactggcttaatctcagcgggttcttgttcatgccactttctatggttacgggtgcaatttctatagcacttttcaaacaagggtggattgccccataccctttcggcattgatcatgttgtattgtttgttatagtgtatattggtatttgtgccataagctttattttgttgaaaaggcgaacaacaggggctccggtttgatgacaacctccggtttgtcgaggtaatgccttttaacgataaccttaagctatcgttaaaaagcatgtggatatgtttccacattcagacaagacttcatgacatacttagtgtacactcgtttcattctgaggccatcaatctattgtcaagataataaggcttattcggtgcctccaacttggacaaacacttgaacagaaagcagccaattacttgaaaaaaatcagccaaatacttgaacgaaaagcagcaatcgaggtaggtcagcagacatttgcaccaaatcaaagatttgggcaaatggttgcatcagatctacattgattcgctttcgctcatcatgttaggtctagatcatgccgagaatctccaagggattggcaagattcgacggctgaggcgattctcgtcttctgaaaattaaataaatagcctataaggctttcggggttacggtataatcccgaaagtcttttttatgccggcagttttgaaaacagagagaagtattgaaaggaaataacgagagggagattgattatagaaaacggaagtaccggaagtaaagaacagataaccgagtatttgaaatgcttcgtcccattcgctgaaacgaatttcgaaataaggcctctatggaattatttcgaaataggattgaatttagcaggggcatctcctatacttagattaaggtccgttatggaaataattttaaatagaaaggggtgcatgcgcatggagataaagcgggattattatttagagaaattaatacgaaaaaaagataacggattgattaaaatcatcacaggaatcaggaggagcgggaaatcctacttactcaatcagctgttttacaatcacttacttgaaagcggcgtcgataaaaaccatattattaaatttgcctttgactccggaagagatctgttgaaaatcggcgaagatctcatggatctggacgtgctgagcggggaaaggttggtcgatcctaaaaaatttttagactatattatgagcaaaacaaagggcggcgagaagttttatatcctcttggacgaagtgcaattgttggcgtcctttgaacaagtattaaacggctttttacgtcaagataattttgatgtttatgttacgggaagtaattctaaatttttatcgaaagatgtcatcactgaatttgccggaagaggcgacgaaatccatgtcatgcccctggtcttttccgaatttcttcaaacttatgatggcgataaagaagatgcctttgccgactatcaagtctatggcggtttaccggcccaagccttgatgaagacggaagaagacaagatgaattacctcaaggggcaactcgaaaatgtctatttgcgagacattgttcacaggtatgacattcgcttaacggccgagctggaagatttgctcaatatcttggcgtcgggcactgcaacgctgaccaatccgacaaaactggcatctaccttttcgtcgattaagaaatcaaaaatttccgccaataccatcgataaatttatcggctattttgaagactccttcatgttgaaaagggtgtacaggtatgatgttaagggaagaaagtacattggaacgccttataaattatattttgaagatgtggggcttcggaatgcaagattaaatttcagacagatcgaaccgacacatcttatggagaatattatttataacgagctgagatatcgagggtatatggtggatgtgggcatggtggtgaaaagggaaaaggataagaataataaagatgtaaagaaacagctggaagttgatttcatcgccaatctgggaagcaagagatattacattcaatcggcatatcgccttccctctgtggaaaaaatgaatcaagaaaaagcgtctttgttgacgatcgacgactcatttaagaaaattatcatcgtaaaagaccgggtcaaaccgtttttagacgagcacgggatactgacgatgaatttatttgactttttgttaaacagggaaagtttagacttctaatgaataacttaacttattcgttatggatatattcccacatacgaggcttttcagaaatatgaaattttattcatgctgaccactcgagccatcgccttattgtccaaacttatatgataagcatatagatgttgaaattaagctggataagtgccgaaagtaaagcgacttatgcgcaaattaaggagtagatttgagagaatttaatttcaaatctctatattgcacagattaaaaagtgtggaattgtacggatggagcactataataaatcgaaaatggagatgaaaaggatgaaaaaacacgttggcatagcattggttttaatcactattttgacgttaactgcatgtggtagtcatagcagtaataaaaaaatagttctaccaaaagccgaagaaataaaagaaattgaaattatgaaaaacacttcagaagagagtttgaaaattgaggatcaagaggaaatatccggcataattgaagagattaaggaaaacaccaatgataccggtaaggaaagtgttaatgatcaacccacaaatataaaggattatattatcgttaaatttcattataaaaatgcagatgcaagtccaagcattgcgtatttatataaagacaaaaacagtcgttatgttgaacagccatattcaggtatttggaaggtaagagaagaaacatttgatagaatcagtagtcatttgattaaataatgatcttcaaccatccaagtttatcgggttcggcaagttataaaatagctaagaaataacagcaagggtggaagatatgatgcgaaataatgatattttaacaacgccaccggaccttggcttaattgcgaaagaggtgtttgaagaggctgaagagcaagaagcatacaagcggataagcattaagataaatgaagagctgaagacctttttagaacaaaacagtgagcgagacggaatagacaagcaatacgagatcccgggcagctcgaccttgaacaatctcttggtcgtgcgggttgaggatataaaagccaagtcgagttactatgagtgcgagcttttggttcagtttttcgacgaaaaatacaattttaaagatttaatggcgttggaagaaacgattaaacctcaaaccaatggcttaaccgatttagaaaaagcggaatttctaaatgcttatatcacaaaaaacatagcctatgacaaggaacacaggtttagatcagccgccgccgctgccattaaaaagaaaggcacatgcaccgccttcgcccagctgtttttgattttaggtgaagcagtgggtttaaaagtgggttgtatcaacagcaaggtcatgaaacaccgatggaattatgtcgtcattggggacgaaacctattacatcgacaccgctttcaatgcaagtaatccgatatcgaacagattattcttccaaaccaccccgatccacttagacaaagccccggaccagggaatcgcggtaccacacagaaagtaagaaggagaggtctatgttcttcagtgatgaatttcttgcagacgacaggaaattcaaaaaactaatgaccgccatggtcagtttaacgattcttttgattctattttctttttgcttcggtatctcgactgtgaaggggagcagcatggaacctactcttcatgagggggacaggtattttgtagtaaaatctcccctcgtaaaggaatacgagaaaggcgatatcgtgttcctccatcttccgggctccaagaagatgattgtgaagagaatcgtcgccataccgggagatagggtagtccttaatagtaaaaaatccattatcctgaaagaggatgaagtgttcttaatgggtgacaacaggggtgacagcttcgactcgagggacttcggcccggtaaaagagaaagagctaaagggcaaattcataaaaaagattttcggcagaaaagcctcggactaagttcaagggcaatcgaagaccggatccgaaacgaattagattttgacaacgaaaataaagaaaagaaccgggaggcatcatggataaacagatgaattgattcaagtttgatgagattataaagcagtaaaacgataatcatagttaaggaggaaaaatgagcaaaaagaatctgtggctgatattaacgattctcgcgtttattacacttctagcctcaatatacatgtcctataaaagcggacaaacggagtacgcgtggatcattggttcgatgcttttcggtatcggatgcggaagtcattataaagaggaaaaggtaaaagatgaacattagaaaagcaaatggtaatgatatggatgccgttgagaaaatatacaatgaaattcaccgggcggaacaaaggggtgaagcacatatcggttgggaaatgggcgtgtaccccgtccgccaaacggccgaggacgcactgaaacgaggcgatcttttcgtacttgaagaggatggcgtcattatcggcagcggaagtattaacagggaacaagtggatgtttatgaagatgcccattggagatacaaggcagatccgtcggaagtcatggtgcttcacacccttgccatggatcccggtaaaaagggcaaaggctatggcagggcttttatgaaattttatgaagagtatgctttaaaaaatcattgcaagtatttgcgtatcgacaccaatgaaaaaaataaagttgccagaaagatctatcaatccttgggctatgaagaaatcgactttattccctgcacctataacggactggaaggtgtcaacttggttttaattgaaaaagctttaaaataaaatttatacgaacaaagaacggcacacttttttaatcagggtgggcctctgccctgtaagtgggctgaatgtccatcttcgcctatggcattaaaaaagagcagcctttgtgctgctccatacttgatttaatcatccgttaagggatgaatcttgtcttttgccacatgaattaagacccgattccccggcatcagctccctcgtcgatttaaaccggaggccgcaaagggtgaggtagtcaaagctgaaggggtttcttatgcgctctttaatttccacttcccactggatttgccccgggccaagtttgatgtctcgttcatagattccgaagtaatcccctcttaggggaatgttttttcctaaatttgagtcggccggaaagaggttttccacgccgagaagtttggcgaccgcctcctgcggcgggtttaaaatttccaagtttccccagacactcaagtgggggaagatcgcgtagtcttggaataaaaagcccagatcccgcccttggggtcactctggaattccggtcttttatcttatcttctttttttcatggaaccgaggagccctcttgcaatttcgcggccgatggatcgcgaaatggtgccgagcatggagtcgatgcccttatcgatggcagtcttttggctgcggcgggatttttgtgctctttccgattcttttctttgagcttcaagttctttctgtctttcggcttctgatttttcccgttcagcttctgacttttctctttcaattcgttctaagagaacttcgtaggcggattctctgtcgattgcttccttgtactttgcataaaggggcgaagactcgatcaaagcgccataggcctcatcggtaagtgtcacgaaggaggagtggggcgggaggatcagtgccttgtctgccaccgtcggcgcgccgctttcatcggcaaatgaaaccattgcttctccggtcctgagaccgatgatttcttcttttatatccatggattcatcctgcctgaatgtgtctgccacggcgtttatcgcctttagctcctttggagaataagccctcagctgatggacgattcggttggaaagttgtgacgacacggattccggaacgtcgaggggattttgcgtgatgaaaaatacgcctacccctttgctgcgcacgaggcgaacgacttggataatcttgtcctgtaaaattttcggcgtgttgttaaagagtaaatgggcttcgtcaaagaagaacacaagcttcggcttgtccaaatcgccgacctcggggaagttttcatagatttccgaaagcaagtagagaaggagcatggagtagagaaggggatttgaaatcaacttcgtggcacttaaaatatttaccacacccctgccgcttgtatctgttttgatcaggtcgttgatgtcgatggcaggctccccgaagaggagatcgccgccaccgtcttcgataaacaaaagttttctggaaatggcagagagactttgagcggccacattgccgtaggtcttactgatctcgtccctattttcaccgacgaaattgatcacctgtttaagatcctttaaatcgattaacaacagcccctcgttgtcggcaactttgaaaataatagttaaaaccccggtctgcgtatcgttgagctccaaaatatttgcgagcataaggggacccatctctgaaacagtcatccgaagcggaattcctttttcgccgtagatatcccacatgtttacaggataatttttaaaatcaaaatcagaaatccccaattcttcaaggcgtgaatttaattgatcattcatctcgccggccattgacagattcgcaagatcgccctttacatccgcaagaatggtcggaaccccggcatcggagagaccttctgcgagcacctttagggtgacggttttgccggtaccggtcgcgccgctgattagtccgtgacgattcattttatttaaaagaatataattttccgcattccccttgccgatcaaaattttgtccatgagaacctccttaattatataattttattataacaaattaataaaaatacaggacgaagaatgaataaaaagcaaaaatcctatcgaaacgagtggtataattaggctgatagataatatcatctaaacagaggaggtgcatcactgtgacattatacaagagtatcttgatcggtcttttaggttcattcatgatgtttttgggagacatgattttatattacgattccaatgattacgacggcaaggacaccatcaatcatattaccggcataatgtaaaatgtcagcataaaaagattgtacattggcggtcttttaggtcccataactgcctttatctattgcatcggcttttaccatattgttttggccatgcaagagaagtatttaagcatcggttggtttgtgtttttaatcaattgctttggcatgatactcggaggcgcttatcacattcaatgtgcctacctcggtcttttatcgaggcacgaagacaaaggggcctttgatgaatttttaaaatttttaaaatttcaagcaaaaatagttttcggaatgatggctttagcaaacatagcaatggcatggatcattttatttggattcaccgtatttccaaggtggcaagccttctttacaccgatatttctaatgatttttactccaattgccgggagattgccaaaggggctccatatgattattcgcggaggttggttcaactttatttattttatttactacctatctttattgatacactgcatgactatgaatttataagctataaagtcgggaattaaaatgattaataggagataaagaggaattttatgaaacaatcacatttttctgaggacaagaaaataaaacttgattacaaaaactgggttcctaaacgattgctgaaggcgaagattggtgaaagtctggtatgtcttatcttattcatcttatttggtgcaagtgatgcaattcttcaaggaaggccgaggatcatttgcggccttatcttagggataggatgtttaatactcctattaataactgcctggcttgccatcttatacagaacctttgattacaagggtaaaagaaagctcgcgaaagtcatcgtcgaagggactgccgactatgtaaagatcccggacggtggcgtgggcttagatgtgggctgcggcagtggagcccttaccatagcctgtgccaagaaaaacccgggggcgatgatggtaggctgtgacatatggagcgggggatacaagagtgaattttcagagaagctttgccgggacaatgccggggctgagggagtaggaaatgtgcgctttgaaaatggcaatgcagtgaagcttccctttgaagatgaaagttttgatgcagtgacaagcaactatgtctatcacaatatttttgggaaaaataaacaaaaacttttactggaaacattgcgtgtacttaaaaaagggggcgtttttgttattcacgatttgatggataagccaagatatggagatatgaataaatttatcgaaaagctggaaaaagacggctatgaagatgtgcaattcatcgatacgacaaagggtctttttatgggtcacaaagaagctatgttgctgggactttccggctcgaggcttcttatcgggagaaaataataaaatacatacaaatcagcataaaaaacggatggggtatgcgagatgaaatataaaggtatttatttcttattatttaagggtccgatgaagaaagttcttatagaaaagtatgataaagcatatgcgtcagaaattatcagaaagagcaaaaaagtttatcgggaacttgtagaaaatatggacgatataggcgaggataatcccatggcctacaacgagatgtttgctctcgtgtttgtcgccccctatttagccagcgagaaaaagattccgccggaaatcgtgcaggagatgatgcgtcgatccctttattttgtccggccatatttttctctcgtcgacctcaatacgaaatgggggaaggcggccaataagaaaaacatcctcaagtattacaaatggtatacgccggaaaaagaaaagcgctaccccacgtcatttaaagtcgattttgtgggcgagccctatgagggcgcctgctactacagaatcactcgttgcccgatttgtgcctacaccgagaagctcggcgtcgccgaattaatgcccctgttttgcgagctggatgatgtgatgatcagtcttcaacacggcgtactccacagaaaagacactatagcaaatggagcggattgttgcgattattttattacaggggacagagaatgaaccgcagggccaaacagcattcggaaaatgatctttaaggagggaaaaaatgagtttaacgtataagatagcatcgaccatcgtaagacttctcggtgtcaaaaaaatatttattaaaaacaaagaagacatactcgcctacgcaaagaaacagaatgcaaaagcagtctttgatttggacagggcaatgaagcgggctgagaggagaaactattttcttttcgaaagagaggtcatgggatacaggctactttcataccaaaaagatcaaatgcccgccgacggggcggttcttcatctcttcggcggcggcatgattacgcagccggacaaaatggatttttctctggcggaacgaatcatggaaaaaacaggtaaagacgtatggtttttgttctatcccctctgctcggaagatgtaaaggtggataagacctacgacgtttgctttgaaacctatcggctgatgaccgaaacgtataaggcggagaacataagtgtccttggtttttcctcaggagccggtctttctctcgggctatttttacacaataatgccttgggcaagccccttcccatgcccggaaaaattatttccgtatctcccggcggtgttcccgatgtcaacctcgatgaaaataaagaaatatgggaaagggtcaatgaactgaaccataaagacattatgattgagcccacctattttaaaacggcgagagagatcttaaagggagataaagatatcccggaatatatgttagacgaaacggtgggcgattttaccgacttcccgaaaacatacttttattacggggaaaatgaatgcctctacgcctatgcggacgaatttaaaaaagcaatggaaaaataccgggcgtcctacgaaatcaccgtagggaagggcatgtgccactgttatcccttggttcgttttttcagagaaggcagagaggcgcaagatgaaatcattgaattgttgaagtcttaaaaaacgcaaattttatgaaagcatctacgagagtaggtgcttttcttacgccaaatatcaggaaaccttccatgcacggaaaaggcgcaggacaatccaaggaggatgcggcatcgcagattttgaccgccacctgcctttggtgcaatttgttctttgccttaaagccctcgtcttgatgtataattattaccgtggtaatcttaatacatattgaaattcggcgcatctcgaacgaggattggcttttacgaaataaatgatttaaaccggtacgaggcgggatagaaggaggcagggaatgaatgtattattagtggcaggcagaatttttctggcggcctttttaggggcgattatcggcatcgagagggaaacgaaacacaaagccgccggcttccgaacccatattatcgtcagtgtcggcgcctgtttaattatgctcataggtatcgacggcgtgggtaaagtatccggcagcggaggctgggatgccttaaggattcccgcccaagtggtcagcggcatcggctttttaggtgcggggaccatccttcaaacaaaggatgggatatcgggcctaaccaccgccgccaccttgtggctatctgccgccattggactcgccgtgggaatcggctattatgaaggcgcgattatagcgactgtcgtttgcctggtgaccttgatctcactcatgggattcagcgatgcgctcaatgagcgaacgacagtatcttatattatggtatttaacagtacgaatttcgactggggccgctttttgaattacacttccgagaagggcgtggaagtgagaaaactcgatatcattgacgcgggcatcgaggacgaaacaatcattgaagccacgttaacttttcataaaaattacgacatcgatgaatttttcgagatattaaaatcagattcctgcctgcaatcggtaaaattgaggaacaaagaaaataaaatcaatagtaaatgaagcgtgaaaaaggatggcctttaagagtttaaatctttaaggccattttctacgccgaatgagcgatggatataaagtagcatcggatcttattcacgtttcgatagttgatattaataatgaaggaagagggtatcttttagagtaggtacaaatccatgtgattgaaaggaaaatgaaatgaacagaagcgacaacgatagaaaaatattattaaaatcccagcaaggagaattggatgcggtccttatgtatcaagcccttgcagaggtagtgaaagatacaaaggacgcagacacctttcgaaagctggctgcagaagaaggtcaccacgcggccgtgtttcacggacttacaaacgaaaatttaaagccaaagaaaaccttggccatcctcatgcccatcctttataagataatcggaaaaaagaggctctacccgcttatcgcaaagggagaatacgctgccgccgaaaactacgcgccggttgtggaaaaatttcccgtgattgaaagcgtgagaaaggacgaaactcgacacggcgatactgtcgccagtctgctttaagattcatagaggatgaaagagcgaagcacttcaacggatgaatgggacccaagtatcatctttttaattgatgagcaaaagaaagaaatacagatacttccgtgatctacgtgaaacggaatcaggacgagcaacttgaatcattgtaagatggtcaatcgtcttgaaaaattgagttaaggctaaaaaattgtagcagcaatagcttttggggttttaataaccgtagaagccatattttatgtggaagatagaaaggcgtggaaagatttcgtgcactgtttccgaaattggacgaaaaatcaatcccagatcaccaaaaacgttgctgaaacaacatactttggatctgtttgcgtttatgattaagaaaaagagaaatgaaaggagttatcgatatgacaaagaagcttgatttaaataaaacggtcttcgaactgacacaggaatacccggaactggtcgatattatggcgggactcgggtttactgaaattacaaaaaaggccatgctgtattccgtgggcaaaatgatgaccatcccgaagggcgcgaagatgaagaacatctccatgatcgatgtggtgaccacgctgatgcgccatggctttgagcccgtgggcgatatgccggatatggcttcggttacgacgacgcaggggcaggaagagaaaacaagccatccttctgcggaccgcagggaacaattgaaggcgtatctgaaaaggctcggcgacggagaagccttggaagatgtgcgggcggatttcgttcgcgcgttcggggaagtggaagcatccgagattatggaggcggagcaggcgcttttgaaagaaggcacgcccctcagcgaggtgcagcgcttgtgtgacgtgcactcggctttgttccacggttccaccacggaagaaaaaatcgccaatgccgaaagggaagtggaggcatcggccataagaaaaaaggcgcaggcggttaagcaagaaaagaaggcgaagacggcggccctggaagccatcacggggcatcccctgtacaccttcaagaaagaaaacgacgccttgtcggcgctgctagctgaatttaaagagcacagagatgaatcgctccttccaaaaattcgcgagctttcgattcattacgccaagaaaggcgatctgctctacccgctgctcaaggttcattacgaaatctccggtccttccgatgtcatgtggacggtcgacgatgaaattcgcgacggcctcgcttcccttatgaaggaaaaagaacatggcgaagcatggaatgcccgcttggataacctgcttactcgtgcggaggagatgatttataaggaacagaacattctctttcccatctgtgcggttaattttacgcaagaggaatggtacggcatttatcgggatgccaaagattatgcgatctgcttcggcgtagaacaaaagacgtgggaagaggccgaaactatggcgcaagcggtggcggtcggtcgggaaggggagatcgtcatgccggggggtcggttgaaaatcgacgagttgacagcccttttaaacacgatccccatggagatcacctttgtcgatgcagagaatatcaaccgcttctttgacgaagggccgaaggtattcaaacgcccccttatggcactgaaccgcgaggtgttctcgtgtcatccgccgaaaatcgagcccatggtccgtcagatcatcgatgatttcagacacggtcgtcgcgattctgtggaagtatggatggaaaaagaagggcgtaccatgctggttcgatacatggccgtgcgggacagggccggcaactacctcggcaccatggaattggtacaggacatggagtttgcgaaagaccattttctcggggacaaagcctgattttacgcaacaaaaaagaatctctgtcgctatctgcactgacccccaaaagttggaccaagaaatccaacctttgggggtcttttaatggcaaaatatagttatgaattgaagagaaaaattgttgaggaatacttggacgaaaaagcaggttatagaatcctggctaaggaataccaaattagctcttcgttgatcagacgctgggtgaacaattacaaacaatttggcgatgaaggcttaatgcgctctagaaataatcgtgcgtacagtgtagagtttaagttagaagccatcacacgctacgaaacgagcg

SEQ ID NO: 50 - DNA, 22559 bp, Peptoniphilus rachelemmaiella
  source 1..22559: mol_type = genomic DNA
cattcatgggctttctaaaaggtaagagcagtatcatgatctatgaacgatggggagacatgaaatttaaatataggggaaggcagttttggtgccgaggctattacgtcgatacagcgggaaaaaacgctaaaaagattcaagagtatatacaaaaccagttgaaagaggatcaaataagtgagcaactaacctttgacacgacgaacccctttaaggggtagccgagtaacgttagcacgggcagaccaccgacgcccttcaggcgcagctagtaatgcaggccctttgggccgaaaaaggaaaacccccggctacgccgggggatgtttattgctaccacaaaggatttaattcgtcgagaaaagcctgcaccgaagcgaaagcctgcagttcattctctataatttcttcgttggcgccggacagggaaatggtgccgatgcattcccctcgtttgtcgaaaaggggaacggcgatggagcccagaccgtcgttgatttcgccgatttccagggcgtaaccccgcttccgcgtggactgcatttcgtgtttcaatacggaatctttcgtaatggtcttctccgtgtaggccaccaggcgcgtgtccttaatgtatttgtccaccaccgactccggcaagctggccaggtaggccttcccggatgccgtggcgtgaaggggaaagggcgtgcgggaacgggtgaggatcaagtagcgggtggtgtccggcacctccgtaaataccgttaagagctggccgtcttccaccatatttaatcgcgcgcttaactcaaaggcattggcccaaacgcgaagcatgggccggattttatttttcacgtggaataagtattgatcctccacgagattggccttgggcacaaaggccaggcccaagtggtagtcattttccgcttcgtcgcgacttaagtattgaaaatgaaccaaagtattgaccaggccgcgggtagtattcacatttaatttaactaatttagaaatttccgacaagcttaacttcggatgcacggcatcgaagcaatctaaaatagcaaaggcccgggcaagtgattgaatggttcggggcgttttatccataatattctcctcattttccagaaaggttcctatagttagattacaccacattttcgcgaagagaaagagaaaaatcaccttgaaccgtgaaaaatttatgatacactattagagcgactaaaagaaaaggagaaggatcttgagtaatagaatcggaaaaatcgcggccattattctcggcatcttggccgtcgtctatctaatcggtgccctggcctttacacaagtctatatgcctaatacatcggttaacggcgccgacatatcccttcaaccgcgggcggacttgagggaaaattttaaagcctcttggaaagactatgccttaaccgtggtaggcaaagacgacaaggccgacaccattaaagcatcggccatcgattacaaagaaaccatgcccgattttaaaatgaaagagtacagcccctgggcatggcccgtttacgcctttatgaaaaaggattataaggtaaacaccaccattacctacgacgatgcgaagctggaaaatgcattggcatacatgcacatggtggcggataaagacatcaccgatcccacgccgcagaccatcgcttacgaggaaggcaagggctacactatcgccgatgccaaagaaggcacccgcttagacgggctgaaactcaaagcggcggtattaaagtccatgcacaaacaggacaaaaaattagacgcgaagaaggcggatctctacctgaagcccgtgccggcggaagacctcgaccacatgaaaaaacacgtggccagtttaaataccatcgaaggatacaaattgacctacactttctccgacagggaagaagtgttggcgggacaaaacttaattaatctttacaaatccgccgaagacggcagtttggagccggatgaagaaaaggtaaaagcctatgtggcggagctgggtaaaaaatacgacacctttaaagggacgcgagattttcaagccaccggcggtgccatgatgcgcattcagggtggaatttacggctggcaaatcgatcagcccaagacccgcgaacagctcatgacggcgttgaatgacaaaaaagttcaaagcatggagccggtgtataagagaaaagccgtgagtcgaaatgtcaacgacatcggcaacagctacatcgaaatcgacattgcccgtcaacatatgtggctttataaagacggcaatctcgtcatcgattcgccggtagttacaggcaatccctacgccggcaacggcacgcccaccggtacccacgaaatttggtcgaaagaacgcaaccgctaccttaccggggatacatggaagagctacgtcaagtactggatgccctttaactggacgggctgcggcattcacgattccaattggcggggcagctacggcggcagaatttatttaggcggaggcagccacggctgtgtcaacacaccgtcctccaaggcgccgaccttttacgaaaatgcctttgaaggcatgcctgttattgtttacaactcaaataaacacgccatttaattgaagcgcctacgggcgctttttttgcggaaaaattttcgtgaaaatccgaggaaaatttgcctaaggatctgttttcccgcggccatttgttgtaaaataagttgtacgatttgcttgtatgacaggaggctattttgaaaaccatttacgaaggaaagacgaaagacattcgacaagaaaacggcaagacctatttctacttcaaagacgacgtgacgggcaaagacggcgtcttcgatcccggtgaaaaccaagtaggcctttccatcgaaggttccggccgcgcatgcattgccatgagcaaatacttttttgaaaaattcgaagcagataaaatccccacacactacatttccgccgatgtagacaatcgtctcatggaaattaagcctgccaaagtattcggcaagggcttggaagtgatctgccgctttaaggctacgggtagctttattcgtcgctacggcaaatatgccaaagacggcgacgttttaaatcgctacgtggaattcaccttaaaagacgatgcacgccaagaccccctcatcaacgaagatgcgctggtactgttgggcattttaaaagaaggggaatacgaccgcattaaagagcttacccgctccatttctcaagtgatctacgacgacttaaaggctcgtggtctcgaaatgtacgatatcaaattggaattcggccgcttagaaggcagcgaagaagtcgtattaatcgacgaagtctccggtggcaacatgcgcgtcttcaaaggggacgaatacatcgaacccttacgtctttccgaaatgatcgtcggcaaataagcacggttcgttaaggagaaaaaagcccttcggggcttttttttgtgtcccgaaattctgaaaacccctttcatttatttgaaaaggtggtataataaaaatatatcaaacaaatcaatcttcagggcgaggtgaaattcctcatcggtggtaaagtccacgtgtcgaaagactgaattggtgcaattccaataccgacggtgacagtccggatgaaagaagatcttttttttcatgtttatgtgcccggggatgcgggctttttttgtgccccacaaggaggaaccatgaatcaaatccagcggacgaaggcgcgctactccacgagaaatttaacgcgtctgtccctcttatccgttatcgcctttttacttatgtacatcgaagtgcccttggcctttattgcaccgccttttataaaaatcgacctgtccgatatgccggccttaatcggcggcttcgccatgggtcccgtggcgggcatcaccattgaactggtgaagtgcatcctcacctttttcgttcgcggcaccaccaccggcggcgtcggcgagttgtcgaattttatcgtcggcgcactgtttgtcgggctctcgtcgaaattttactgtgcgcgcagaacctaccgcggcgccgtcgtcggccttttaatcggcgtcatcggcatgaccgccgtggccaccttgagcaattacttcgtggtttttcctctctacggcaagattatgcccatggaagccattattaacatgggccgtgccgtcacgccgcgggtcaactccctgtgggatatgatggtttattgcatcgtgccctttaatctggtgaaggggctgatcgtgtcggcggtgaccctggccttgtataagcgggtatctcatctgctttacgactgattttaaccctgctcttcggagcggggttttttattgcactcggacggtgcgctgtcaatctttacaaatgcaggcggagatactataataatttatacgatatacccttcattctcgaaaaatgggtaggatccgcaatgatattttcattcagaagcatatgaggaggacatgatggaagacggcaaattaaaagtaaaagccaacggggcggcgctcttgccctttattcttttcgtactggtctatttggccaccggcatgattttaaatgccaggggcgtggaaatggccttttatcaagtggcggcaccggtgtgcatcttgccggccattgtgctcgcctttgtcatgtttaaaggctccgtcgacgacaaatttaatgcctttgtgcggggctgcggcgatgagaacattatcattatgtgtttgatctacatattggccggcgccttcgccaccgtatccaaaacctccggaggcgtggactccgtggtcaacttcgccctgtccatgattcccgttcaatacattaccgccgggatttttcttatcagctgttttatttccctctccacgggaacttccgtcggcacaatttctgccgtaggccccattgccgtcggcgtcgctcaaaaggggaatctgtcgttggccctggttctcggcgcgttggtcggcggcgccatgttcggcgataacctctccgttatttccgacaccaccattgccgccaccaggacgcaaaatgtggacatgaaagacaagttccgggcgaacataaaaattgcccttcccgcggcaattattaccttcgtcatcttcctctttgtaggaaagcccacaggtcaagtggtcctcgacgatttaaattatagcttcgtcttgattattccctatctctttgttttgatttcggcattggccggcatgaatgtctttttggttctcgcaagcggcatcgtgctttccggcgtcatcggcatcgccaccggcggcctcaccatgatgaccttcgcccaaaatattttcgacggcttcagcggcatgttcgaaatcttccttctgtccatgttaaccggcggcctgtcttacatggtttcgcaaaacggcggcattgagtggctggttcaaaagattcgaagcttcgccaaagacgtgaagtcggcggaaatttccatcgccctcttgacccttgtgaccgacgccgccacggccaacaacacggtggccattattatcgacgggcccgtggcgaaagaaatctcgaaagacttcaaggtggatccgagacgctcggcctccctgctcgatgctttctcctgcgtcatgcaaggggtcattccctacggcgcacaaattcttattgccgccggactcaccaaggaattaggtgcggcagcggtctcgccggtggaaatcattcccttcctctggtatcaagggcttctggctctgttcgcccttctctcgatctttgttcgctttgccgatcccaaagacaaatgggactttgaaaaggacactccgcaaattcaatagaaagacaatacgacttgcgccgatgatgtcggcgcttttttcatggcttcagaaaaaaggcacaaaaaaataagaccggctatccgatcttatcttttcacgaaccgcctgagcggcccaatttattcttcttcggcttctttttccgattcagtttcgcctacggtaggtacatcagctgcatcggcggcgccttctgcttcttcttcaacggattcttcgcgaggttcttgcagtgcgcagacagcttcttccaaatcagttaagacttcgatgtcttcgatggatgctacgtctaagtcggcaacggttaaggtatcgcctatttgcatatcagcgacattggccacaccttcggaaggcaggttggtcggcagacattcgacttctacttcttcgagaagttgcaacaagaccgagggttgtacgcgaatgtcgtcgcgtccttccaagacgacgggaatggacagcttgattttttccttcaagttaacgccataggcatcgaagtggagcaattggtttttgtaggggtgttgttggatttccttaaagagaatcttgtgatcttctccgttaacattgacatcgaccaaagcggaagtaccggctacatcgacaactttttgcagttcattggcttttgcagcgacggcaacgggttcagcgtccttcgcatagaagatgccgggaaccaggccttgggcgcggaccttctttgcgccggcggagcctaagtcttcacgtttttctaaatttaatttaatggtgttcattggtgtcctcctttgtttactcaacaatatattatacctgaaacgggccgccatttccacgttttaacaaacttcgatgatgattttctgtataaaagccctccgaagccttttttcatccttctagggccccttagcagggttattataccataagcccttttggtcgcaacgaaaagatgtggtgcggttttatcagcgccagcgctttaagcgctccgcttcccattggcgatcgcgaaaagcgtcgatgcgatcgccaatggcggtcataaacgacggcaggtgaatcacgccgtgggtgccgtagcggtggtagcgtacgcttaagcaaaggccgatcatggccaggttcaccatttgaaaggtgccgccgtagctaacaaagggcaggggaatgccggtaacgggcatgagccccaaggtcatgcccatattttcccagatgtgaatgaagagaacgcttaaaaagccgaagaccatgagtcggccgcctttgtctttggcgagtttggtcaaggacagtaggcgataaaacaaaagggcgtagagggcgagcaagagggcgccgccgagaaagcccaattcctccacgaggacggggaaaataaagtccgtctccttcgtggggatgaaattaaattgagtttggggtccccggaagaggccgcggccgaagaggcgaccgtcgccgatggccacccggccctcgtaggcttgatagccgctgccggaagtgttggcatccggctttaaaaaattcagaatacggtctttctggtaatcgtccagtcgggcgtataagataggcaatgacagaaagcccgcccccatggcgccgaaaatatatttccaatccaaatcggagaaaaacaacatgacggcgatgaaaaataaaaagaccatggccgtgccgaagtccggctgaagcataatgaggcccacgggaaagcccgcaaaggccaaagccttgagaagctccttgggttcgttgattttatcgccgtgcttttctaagtaaaaggcaaaggaaataacgagaaagatcttgacgaattccgccggttgaaaattaatggggccgatggcgagccagcttttcgatccccaggtcgtgtctccgtggccgaagagaagggtagccgccaagagaatgacgctgaggccgtagagaagggggtagtaggtgcgccaaatgcggtaatccaggagcatgagcccggcggcgatgaccacgcccaaaagggtagcgatgccctgcttcattaaaaaggggcgattgccgtaagagagggtggccgatgcgagggccacaaagcccatgagggtaatggcggcgacgatgaggattaagctgcggtccacatcccattttccgggactgacgcgtataaaaaagggtttgactttttcaaaaagctttcggtgaaacatagtatctcctttgtcagagtgtgatactattattatacaacaatggaaaggacttgggatggaagtagaccgaatcaaagcgcaattgggatttcacgatttagccctggtgccggcctcgcgattagacgccatggcttctgttttgatgaagcgaaaagcggcgggggagatgctgcccattgaacatgaagatatcgatgcccgcctggatcccgcgggaagcctcccttcggcgaaatccgtttttgtcgccttcgaacaagtgcctttcgcagagcaggagccggagtcgatgaaaggctacggcaggctggcgagtttttcaagagacacggattaccacgtgattttaaatgaaaaaatggcccgtttggaagcctatttggagaaaaactatccggaggtagaatactaccgccaggtggacaccgggcctttgtacgagcggggctttgcccttctcaccggcaagggctttatcggaagaaacggaagctttattcaccaccgcctgggaagctatgtggccatcggcctgttgctcacaaccattgaaggcggtgaaattcgcacgccccttggcagttgcggcgattgccgcgcctgcgtggacgcctgcccgggaggcgccatcgaaatgacgggcattttgcatcccggtcgctgccgctcatggatcacccaaaaacgaggcgagctcacggaaggggagcgggcggtcatggccgattggctttacggctgcgatgtgtgccaaatggtttgcccgaagaacaaggggatcgaggcggtctatgaaatcaccgatcccatcgaggctgtttgcctcgacggattggaagcggagtcgaaccgttcctttaagaaacgctacggtcggctcagcggatcctggcgagggaaaaaacagtgggtaaaaaatgccgcctacattcgccgctattttaatgagaggaagaagtagaatgcgtttaacaaaaaaagaagcactgcaagtgtacgaccgtttggaaaaaatgtttcccgacgcccgtgcggagttggattacaccacgccctacgaacttttaatcgccaccattctttcggcccaatgtacggatgtgcgggtgaataaagtcaccaaggtgctctttcaagaacacaatacgccggagaaaatggtgaccttgtctcaggaagagctggaaaccatcatcaaaagttgcggcgtttatcggaacaaggcgaagaatattctcgccgcctcccgcatcattatcgaaagctggggcagcgaaattcctcccaccatcgacgacttaatgaccctccccggtgtcgggcgaaagaccgccaatgtggtggcttccaatgtgctgggcattcccgccattgccgtggacacccacgtctttcgcgtgtccaatcgtctggggctcgccgaaagcaaaaatgtcgacggcacggaaaaacaactcatggccatttggccgaaggattgttggagcaagggccatcatctcttgatctttttaggccgccgcatctgcaaggctcagcgccccctttgcgacgaatgcgacctgaaagatctctgccattacgtgcaaggagtatctgcttaatggaacaaaagtatttgcacttccgccgaaaaaagcgacgccaacttaaacgcatgaagcgacgacgcatggccgccacggcggttggcgcccttttaatctattttatttttctcggccttttgcccaccttcggcatcatcagtcccggaaccaattattgcggcaagtctctgggctttttaacggtgaagggtgcggagaaaaagataaacaaatacaaggaagattttctctccgccgacgtggtcttaacccacaaggagaaatccgccaccatgacctcgcagcaactggggctctccatgaacgaaaaacaggtggcgaaagatgcgttgaaagaaagcaaaaatcgccacttcttctcccgcatggcacaggcattgaagaaagaaccggtgcatacgccccttgtcgtggatgaggccaccttaaatcggagcctcgctagcttaaacggcgtcctctacgacatggccaagcccgccaccgtggcaacggaaggggagaaggtcgtcatacgccccggcaatcaaggggaagtgccggatacggcccgggctattgtggatttatcgcacggcatcgataagcctgtagagatccgtacgaaaaccgtggctccggacatcgaggcacaggcgctggcgggaatcgatgggaaattagccgaagccgtcaccacctatgaccccgcagacaaaagccgcacgatcaatgtggaaaacggcgcccggtacttccgccgcatcgtcttggcgccgggggaaaaactttctttcctcgccaccatcggcggcattaccgaggctcacggcttcgtcaagggcaagaccgtgtcaaacggcgtggaaaccgagggcattggcggcggcgtttgccaagtgtccaccaccatgtacaatgccgtggcccgctcggggcttaatgtcatcacgaaattcaatcactccaaggccgtgccctacgcaaaagaggggctggattgcgccgtaagcgacggctacaaagattttatcttcgccaacccctttaccaagcccgtctacatcgaaaccaaggccaagggcggcaccctgctttgcaccatttacgggcccgcgaaagaaaagcccttcgccatcgacttggtgcctgaaaaggtgcgggaccttccggcagccaacgatatcagctacacttcggacctggcaccgggtgaggtgaaaatgattcaaaagcaagtgaacggatcgatttacaacacctacgccgtctattccatgggtggaaaagaacttcggcgcgtcttcgtggcaagaagccgctacgttcccgtggacggaaaagttttagtgggaaaaaagaaataatctcttgccatttaaagcgcctcgtgttaatataataaattgcataataatctaaaaatgtatggaaaagacggtcgcagctacgaaagatgatgtatatgtaagttattgacgattcaatttgaagagattcttacacatacattttttgtttttcgaaggaactgtaaggggtgaggaatttaatggtacatcctgttcaatatggcaaacgggagagaatgagttattccagaatcgatgatgtgttggagataccgaatctattgggcgtccaaacggattcgtttaagtggctcatcgatgaaggtctcaaagaagtgtttcgggatatttcgcccatcgaagactttgcgggaaatttaatactggaatttgtcgactactatgtatccgatgagaaaaagtacgatttcgaggaagcaaaggaaaaggacaccaattattcggcacctttaaaagtgaaggttcgactgatcaacacggaaaccggggaagtcaaggaacaagaagtctttatgggcgacttgcctttaatgagcgccaccggcaccttcgtcattaacggggcggaacgtgtcgtggtcagccaattggttcgctcccccggggcttactataaagtggaattcgacaagacgggcaagcaattattctcctccaccttgattcccaatcgcggtgcttggctggaatttgaaaccgacgcccaaggcgtggtcaatgtgcgtatcgatcgcacgcggaagatccccattacgatcttacttcgggccatcggcgtggaaagcaatttggaaatcacaaaccttatgggtgagacggaagagctcttgaaggtctttgaaaaggaccaaaccagcaacaaacaggaagcccttctggagatttacaaaaagctccgccccggcgaaccgcctacggtggaaagtgcccaatctctctttgaaaatatgtttttcgatgcccgtcgctacgacatggcgaaagtgggccgctacaaattcaacaagaagctggcccttcgggaacggctgcaaaatcaaattttggcggaagatgtcatcgacggggaaaccggcgaagtcatgggtaccgccggcgaaagggtgagccgcgaggaagccatcgccattgaaaatgcggggattaaccgagtggaaattctcgtcgacgatcccaatgccctgggtgaaaagatgaagattgtccttctcggaaacaatttcgtcgatcccgccgccttggatacggacatcgactttaaagccctgggcttcagagaaaaaatctatctgccccgcctgaaagaactcttcgaagcatacgaaggggaagagctcattacgcggattaaacttcattataaggaattgtctccgaagcacattttggtagacgatattttggcggccgtaaactatgaattcaatctgttctacggcatcggcaaaaccgacgatatcgaccacttgggcaatcgtcggattcgctccgtgggcgagcttctgcaaaaccaattcagaatcggcttaacccgcatggaacgcgtgattcgcgaacgcatggccgttcaagatcccgatgcggccacgcctcaatccttaatcaatatccgcccggtgacggcggccattaaagaattcttcggttcctctcaattgtcgcaatttatggaccaaaacaaccccctttcggagctgacccacaagcgtcgtctctccgccttggggcccggcggtctgtcaagagaccgggccggcatggaagtccgcgacgtgcacaactcccactacggacgtatgtgccccattgagacgccggaaggtcccaacatcggtttgattacatcccttaccacctttgcccgtattaacgaatacggcttcattgaagcgccttacagaaaggtagtcaaaggcgaaggcctggttacgaacgaaatcgaatacattaccgccgacgtggaagatgaaaacatcatcgcccaagccgacgaaaaagtcgacgaaaacggccacttcattaacgaccgggttatcgcccgaggcatcgacggcctcgtcgacgtctacaagcgagaagacatcagctacatggacgtgtctccgcagcaaatcgtcgccgtcggcaccagcatgattcccttcttggaaaacgacgacgccaaccgcgccctcatgggctcgaacatgcagcgtcaagccgtaccgttgttgaaaacggaagcgcccattgtcgccacggggatcgaatacaaagctgcccgcgactccggcgtctgcgtcatcgccacggaagacggcaccattaagaaggtatccagcaaccaaatcgtcctcacgccggaagggggcaaggaagacattaccttccgcctccacaaattcgaaaaggccaaccaaggcaccaccattaaccaacggcccatcgtaaacgaaggccaaaaggtaaaacgcggcgaagtcatcgccgacggcccctccacggatttaggggaaatggccttgggcaaaaacatcttaatcgcctttatgaactgggaaggttacaactacgaagacgccatgctcattaatgaagagctggtcatcgacgacgtcttaacctctctgcacattgaagaatacgaagccgaagcccgcgacacgaaattagggccggaagaaatcacccgcgacatttccaatgtcagcgacgacatgctcaaggacttagatgagcgtggaattattcgcgtcggcgcggaagtgaaccccggcgacattctcgtcggcaaggtaacgccgaagggcgaaacggaactttccgcagaagagcgccttttgcgcgccattttcggcgaaaaggcccgtgaagtgcgggatacctccctgcgcctgccccacggggaagcgggcatcgtcgtcgacgtgaaggtcttcaaccgcgccgacggcgacgagctgcaaccgggcgtcaacgaaatggtccgcgtttttatcgccacgaagcggaagattcaagtgggcgataaaatgtgtggtcgccacggaaacaagggggttatctcccgcgtccttcccaaggaagatatgccttacatgcccgacggacgccccattcaaatcgtattgaatcccctgggcgttccctctcggatgaacttggggcaagtattggaagtccacttgggcctcgccgccaagaaactgggctggcacgtggccacccccgtattcgacggcgccaacgaacaggatatttttgataccttggaaaaagccggctactccgccgacggcaaggtgcaactcagagacggccgcaccggggaagacttcgatcacccggtcacagtaggctatatgtacatgctcaaacttcaccacttggtcgatgaaaagattcactcccgctccaccggcccctactccctggttacgcaacaacctttgggcggtcgggcgcaattcggcggtcaacgtttcggggaaatggaagtgtgggcactggaagcctatggggcaagccacaccttgcaggaaatgctcacggtaaaatccgacgacatcgtcggccgggtcaagacctacgaagccatcgtcaagggcgaaaatattcctcaaccggggattcccgaatcctttaaggttcttattaaagagttggaagcactggctcttgaaatacaagtactggacgaaaacgaaaacgaagtggatctgagtaccgatgacgacgatctcaatcacttggattccatggacggaaaaatagacggagaagatgcaggggagctcatcgaaggaaaatccaccgtggatgccttggcaggcattcgcagaatttccggcgatgcgattccgacaggttttacacaagacgaagaagaggaataagtctcttcggcagttgaaggtactctaaagaaaggagtcttgctccttgagcagaaacgaattatttcattccatcaaaatcggcttagcatcctcggaaaaaatcagatcatggtcttacggggaagtcaaaaagccggaaaccattaactacagaacactgaagcctgaaaaagaaggtctcttctgcgaaaagatcttcgggcccacgaaagactgggagtgttcctgcggaaaatacaagcgcctgcgctacaaaggcgtagtctgcgaaaaatgcggcgtggaagtcaccaaatccaaggtgcgcagagagcgcatgggccacatcgaattggctgcgccggtctcccacatttggtattttaagggcattccctcccgcatgggccttgtcatggacattagcccccgggcgctggaaaaagtcctttacttcgcatcctacatcgtcacccgcgtcgacgaaggggtgccggatttatacgaaaaacaactcctctccgaaacggaataccgcgagtttaagcgggaatacggcgacaaattcgaagcgaaaatgggtgcggaagccattcgcgaccttttacgcaagacggatttagacgcgatctccaaggatttaagggatcagctggacgatgccacgggccaaaagcgggtgcgcattacccgccgtttggaagtcatcgaagccttcagaaactcgggcaacaaatgcgagtggatgatcctcgattgcatccccgtcattccgccggagctgcgccccatggtgcaattagacggcggccgcttcgccaccagtgacttaaacgatttgtatcgccgagtcattaaccggaacaatcgtctgagaaaactcatggacatcggcgcaccggaaattatcgtcaggaacgaaaagcggatgcttcaagaatccgtcgacgccttaatcgacaacggccgccgcggccgccccgtcaccggcgccggcaaccgccccttaaagagcctttccgaaatgctcaagggtaagcaagggcgtttccgtcaaaacctgctgggtaagcgtgtcgactactccggtcgttccgttatcgtcgtcggcccgtctttgaaattctatcaatgcggtctgccgaagaacatggcgcttgagctctttaagcccttcgttatgcgggaattggtcgacagggaactggctcacaacatcaaaagcgcgaagcgcatggtggaaagggtgcgccctgaagtatgggatgtactggaagaggttataaaagaccatccggtgctcttaaaccgcgcgcctaccctgcaccgtttagggattcaagccttcgaaccggtcttggtggaaggcaaagccattaagctgcaccccctcgcctgtacggcctacaacgccgacttcgacggggaccaaatggcggttcacttgcccctctcggcggaagcacaggcggaagctcgcctcttaatgctctccaccaacaacattttggcgctgaaagacggcaagcccattaccaccccgtcccaagacatggttctcgggatgtactacctgaccttagatagaaaaggccacgtcaagggcgacggcatgacctttgtcgacgaaaaagaaatgatgcacgcctacgcctgcggttgggtgcacctccactcccacgtgaaggtccgccgctttaaagacgcagacgacaagcgcggcaaaattgtggaaagcaccgtgggtcgcttcttgatcaatcgggccattccccaagacttgggttttgtggaccgtgaaaaagatccttacggccttgaaatcgaccgcgtcatcgacaaaaagctcttaggaaaaatcatcgatcgctgctacaaactccacgacaatctggaaacggcggccttcctcgacgaagtgaagagcttgggctaccactactccactgtaggtgccatgtccatttccatgggcgacgttgaaattcccaaggaaaaaccggaaattctccatcaagcggatttagacgtggaaaaatacgaaaaagcctacagaaaagggctcatcagcgacgaagagcgctatgaacacgttatcgatatttggaacgaagccacggatcacttaacggacaaagttatggaaggcttcggcgaattgaacaatatcttcatctttgccgattccggggctcgtggttccaagaaccaaattcgtcaattggccggcatgcgcgggctcatggcttcgccttcggggcgcaccatcgaagtccccattacctcaaacttccgcgaaggcctggatgtattggaattcttcatgtccactcacggttcgcggaaaggcttggccgatacggcactgcgtaccgccgactccggctacctgacccgtcgtttggtcgatgtttcgcaacaagtgacggttacggaagaagactgcggcaccgacagctacatcgtggccaagtcctttaaagacggccgcgaaatgatcgaagaattacacgatcgtatcgaaggtcgtacggcatacgaagatattttccatcccgaaaccggcgaacttctggccaagggcggcgaaatgatcggatccaatgaagccgatgccattgtcgccgcaggcatcgaagaagtgaagattcgttccgtcttgggctgccactccgaagacggcgtctgcgccaagtgttacggcgaaaacatggcaacgggtcgcccggtcggtatcggcgaagccgtcggtgtcatcgccgcccaatccatcggcgagcccggtacccagctgaccatgcgtaccttccacacaggcggtgttgcagcggcagcggatattacccaaggtttgccccgtgtcgaagaacttttcgaagtgcgtaagcccaaaggtctcgccattattgctgaaatcagcgggacggtggacattcgtgaaacggcgaaaaaacgtgaaatcgtcattacagacgacgacggcaattccgaagcctatacggtggtatacggcgctcgcgtcaaggtaaaacccggcgaccgtgtcgaaataggcgacgaactcacccaagggtccgtctatcctcaagaccttcttcgcgtcaagggcgtcatgggcgtacaggaatacatcgtcaaagaagttcaacgggtctaccgtctccaaggggtagacatcgacgacaagcacattgaagtcatcgtcaaacaaatgatgtccaaagtgcgcgtcgacgaagccggcgacacgagcctgctccccggcagcatggtgagcaagaaggaattcgaacacgccaatgaaaaagcgaaggcggaaggcctcaaagaagccacggccattcccaccttgttggggatcaccaaggcatccttggccacggattctttcctttccgccgcatccttccaggaaaccacccgcgtcttaaccgatgcagccatcgaaggaaaacaagattacctgaaaggcttaaaagaaaacatcatcatcggtcaattgattcccgcagggaccggcgtccgccaaaacggcacggtctactgggaagaagaagacaagcgaaaagaagaattagatctgctggaaggcatgaaggcctgatagagaaaagaaactccgcttcggcggagttttttctattgacaagagaaacgtaaagctgcataatttacaatagtattgtaaatggaggtttaaacgtgaaaacaaaacaactgacaaccatggccctgtatctcgccgtgattattttaagcggcctgttggtgattcccacccccgtcggcgtgcccgtcgtgctgcaaaatatggtttgcgccctggccggggccgtcctgggaaagaaaaacggcaccttaaccgtcttcgtcttcttgctctgcatcgccatcggtcttccggttctgcccggcggtcgcagcggcgtcgccgtctttttcggcatcaccggttcctactttatcggctacttgctttcacctttccttataggcctggctttggaaaaagtaaaaagccacggttaccttacgttccttttggtctttgtcctcttcggggccttgctgattaatttctccggcttgattagcttgtacgccaacagcgaaagtttcgccgccgcttttaaaaccatgatcgcctttgtgcccttcgatttagtgaaggccgtgcccatcgcttgggtggctcaacgcctttatgcgacggagccgggttttttaaaagaaatccgggcgtaagaagggataaatcccgcaaaatgcttgaaaactgaacgaaaagatggtacactaccagagtgtaaatcgaccgcatcagaaactacccgctcaacgggtagtttttcatgattgaaaatcgatttgtgctgtaagaaaatcccaattattaaaggaggtgcactaagtgcctacaattaaccaacttgtaaagaagggtagaaaaagatccgaaacgaagtcgaaatcgccggctttaggattcaactacgattccttacaaaaagaacaaaccgtcgtcaactcccctcaaaaaagaggcgtttgcgtcgcggttcgtactgtaacgccgaagaaaccgaactccgcgctccgtaaagttgcccgtgttcgtctttccaacggctacgaagtcatggcatacattcccggaattggccataacttgcaagaacacagtgtcgtcttagttcgtggcggtcgtgttaaggaccttcccggtgtgcgttaccacgtcgttcggggaaccttggatacggcaggcgtcgacggaagaagacaagcgcgttccaaatatggtgcaaagaaaccgaaaagtaactaatcaaagagcacaatcttttcaatagatgctcttggcacacgacatcagtcgagtaccgttgatttttctcaaccacatagttaaggagggaagagaatgccaagaaaaggacatattcctaaaagagaggtcatgcccgatcccgtttacggcgacgttgtcattacaaaattaatcaacaacgtcatgttagacggcaagcgcggcacagcccaacgaatcgtctacggcgcattggaagccgtaaaagaagcaaccggtgaagaacccttagaagtattctacaaagcgttaaacaacgccatgccggttttggaagtcaaagcacgccgtatcggtggtgccaactatcaagtccccttggaagtacgtcccgaaagacgtcaaaccttgggtcttcgctggatcgttcgctacgccagagagcgcggcgaaaaaaccatggtcgaacgcttatccaaagaaatcttggatgcatccaacgacctgggcggcgcagtgaagcgtaaggacgaaatgcatcgtgcggcagaagccaacaaagcttttgctcatttcagatggtaagaaaggggaaattacgtggctagagaagtgccgcttaataaagtacgcaatatcggaattatggcgcacatcgacgccggtaaaacgacgacgaccgaacggattttgtattacaccggtcggatccacaagatcggggaaacccacgacggtggcgcccaaatggactggatggagcaagagcaagaacgtgggatcacgatcacctcggctgctaccaccgcgcactggaaaggctatcgcctgaacatcatcgacacaccgggccacgttgacttcaccgtagaagttgaacgttccctgcgcgtccttgacggtgccgtttccctcttcgatgcgaagagcggggtagaaccgcaatcggaaaccgtatggcgtcaagctgaccgttaccacgtcccccgaatcgcgcacatcaacaaaatggacgttaccggtgccgacttcttccgctcggtaaaaaccatcgaagacaaattacacggtaatcccgttccgattcaaattcccatgggcgccgaagaaagcttcatcggcatgatcgacttggtcaccatggaagctgaaatctacaaagatgacatgggtaccgaaatcgaaatcacggaagtgccggaagaatacaaggcacaagccgaagaatggcgcgaaaacatgatcgaaaaagtctccgaattcgacgaagacttaatgatggcctacttggaaggcgaagaagtcacccaagaagacattaaacgcgccatccgtaagggaaccttagacgtggccatgacccccgttacctgcggttcctcttacaaaaacaaaggggtacaactcctgctcgatgccatcatcgactacctgccctcgccggtagacatccccgccatcgtcggcgtggatcccgatacggacgaagaagaagatcgtcacgcaagcgacgaagaacccttctccgcattggcatttaagatcgttaccgacccctacgtagggaaactttcctacttccgcgtctactccggtaccttaaaggccggtagctacgtctacaactccagtaagggcaagagagaacgcgtcggtcgtatccttttaatgcacgccaacaagcgtgaagaagtcgaagaaatctacgccggcgaaatcgccgctgccgtcggtttaaaagacacatccaccggggacaccctctgtgccgaagatgacctcatcattttggaaaacatggaattcccggaacccgttatctccgtcgccatcgaaccgaagaccaaggcgtctcaagacaaaatgtccatcggtctgcaaaagctcgccgaagaagaccccaccttcagaacctacaccgacgaagaaaccggtcaaaccattatcgccggcatgggcgaattgcacttggatattatcgtcgaccgcttgctccgcgaatttaaagtcgaagcaaacatcggtaacccgaaagtatcctatcgcgaaggcatcctcggatccgccgaaggcgaaggcaaattcgtacgtcaatccggtggtcgcggtcaatacggccacgccaagatcaaagtcgaacccctcgaaccgggcaaaggctttgaattcgaaaacaacatcgtcggtggcgccattcccaaggaatttatcgggccgacccaacaagggatcgaagaagccatgcaaaacggtgttctcggcggttacgaagtcctcgacgtcaaagtcagcctctacgacggctccttccacgatgtcgactcttcggaaatggcatttaagattgccggctccatggcactgcgcgacgccttatccaaggcaaaccccgtgctcctcgaaccggtcatgaaagtagaaatcgtaacccccgaagaatacatgggcgatgttatcggcgacattaactcccgccgtggccgaatggaagggatggaactggtagccggtgcccaaatcgtcacctgctacgtccccttggctgaaatgttcggctacgcaaccagcttgcgttccaacacccaaggtcgcgccaactactccatgcaattcgatcactatgaacaagttcccaagaacgtgtccgaagaagtactcaacggcaaaaataaataagtcaaatccaaattaaaggaggatatacaatggcaaaaggaaaatttgaaagaaccaaaccccacgtcaacgtcggcaccatcggccacgtcgaccacggcaagaccacccttacggcggcaatcaccctcgtattaaacaaacgcttcggctccg

SEQ ID NO: 51 - DNA, 19624 bp, Peptoniphilus rachelemmaiella
  source 1..19624: mol_type = genomic DNA
gcacttggttcgtccggtgacgatagcaagagggacacacctgtacccatgccgaacacagaagttaagcctcttaacgccgatggtacttggttggtaacgacctgggagagtaggaaattgccgggcagaagatttttcttctgaaatgttgaataggatgcttatcgacccttggccggtaagttcttctttattcacttgtgtattcttaggtagctcaatggtggagcaaccggctgttaaccggtaggttgtgggttcgagtcccaccctgagagccataagccggggtggcggaactggcagacgcacaggacttaaaatcctgcggtcgttgagatcgtaccggttcgattccggtcctcggcaccactatggataatgtgtccatcagcaatatgtatcgcgggatggagcagtctggtagctcgtcgggctcataacccgaaggtcgtaggttcaaatcctgctcccgctaccaaatggccccgtggtcaagcggttaagacaccgccctttcacggcggttacccgggttcgaatcccggcggggtcaccatataagggcgcatagctcagttgggagagcatctgccttacaagcagggggtcataggttcgagccctattgcgcccaccaacctggcctggtagttcagttggttagaatgccagcctgtcacgctggaggtcgtcggttcgagtccgatccaggtcgccattacataagtttttcccttatgtgtttttgaaagatgagctcttaattagttgtcaatgtgtgctggtgtagctcaattggtagagcaactgatttgtaatcagtaggttaggggttcaagtcctcccatcagctccagtgcgaaagcacttttcggaggagttcccgagttggccaaaggggacggactgtaaatccgttagctcagctttcagtggttcgaatccactctcctccaccattttaccaatttaagtttgaggcggtagttgggtcgctatgcggttcttcgaatcgaccttctccagtaccgggagttatttcgatattcacctgcgggtgtagctcagtggtagagccccagccttccaagctggttgcgagggttcgattcccttcacccgctccacgagcacctatagctcagtaggatagagcaacggacttctaatccgtgtgtcgggggttcgaatcctcctaggtgcgccattaacttattggggcgtagccaagtcggtaaggcaccagactttgactctggcattccacaggttcgagtcctgtcgccccagccagtatgatccattagctcagttggcagagcacctgacttttaatcagggtgtcccgcgttcgagtcgcggatggatcaccataataggagaggtatcgaagcggtcataacgaggcggtcttgaaaaccgttagggttcacgcccacgtgggttcgaatcccaccctctccgccaataaggagaagtactcaagtggctgaagaggctcccctgctaagggagtaggtccttcacggggcgcgagggttcaaatccctccttctccgccaatttgtgagggcctttagctcagttggttagagctcccggctcataaccggtaggtccagggttcgagtccctgagggcccaccattaagcccagatagctcagtcggtagagcagcagactgaaaatctgcgtgtcgctggttcgattccggctctgggcaccagttgagtaaagactcgagggctgtagctttggctacagtttttttatgtcattgcctacctttggtgatataaaaaaggattgaaaacaggcgaaaaatctgttagtataatagcatcacgtataggagtatagttcagtggtagaacgttggtctccaaaaccaaatgtcgtgggttcaaatcctactactcctgccaagatgagccgagtttgtctcggctttttttgtgtctttataatatggctctatactattcattggggagtaactcttcaatggttgtcatagagccatatttttgatatgaattaatgagtgtttgatcaaggaaaaaacaatcatttctatgagcaaaagcagcgcctggggatgaaagattcattgaatagttataggttaaaggagaatagaataagaacagctaaatgtgcaaacgtttgacaaaatattaaaaagatgcgattatgtctcataagcagataatagtgtggattataacaatttgctacataccgcttattacaaaaaaaggaagggaggtagtaggtttgtcgatcatttattgttaaattcagctgggcatagaaacggcgatatattaagtaaggctcggccggtttaagtgggcccataaaattgagttggtaaacggtaccggaataaccagaaaaaggagatggaaacccctatattgtaagtttttaacaactaaagcaaaggagagatgtcatgaaaagagtatctatatttagtttattagctttggccctgatcctggtggcctgtggtcccaaagagaccaaagacccggcccaaacactggcccaagactttgccaagctctacctggcccagctggacttcaaggaagaggattggaggcagttggaagaagacctaagccgggcaggccaggtccttagactggatggagacctggaagccggccaagaagcggcccgggatctgcccgctctctatgacccctttaaggaagtcatgacccgggaggcactggagacgatggtggccaatggggattacccctacttccccctaagagagaggaccttggacagtgtggatctggtttctgttacaagagtggacccggatgatgatagctacgacctggtctttgtcaccaagaagggggatcgggagacccggcatgtcctcagggctactattcgccaaaagattatctatttggaaagtcccagccaagtctttgacctgtgagggtaagtaaaaaggctgctagcaaatgccatagtcattctgccagcagtctttttttttggccaatctcttacaatttagcctccatgaaaaatcggctctgtgtcatccattggggagtttagtgaatactaggctcctttttgttttcctaaaagccactcatcaccggtcttttgaacaaatgaaaagtagtttcgttgggaaatgatacgcctttcaccgtcttaatcttgttgtgtgttcctttcctcttcgagaaatcaacgctgccggctagcactccgaaccgattccggtagtcgcgtaagcaagtgcaccgctcccttatccgctttttcgccttgccgattcaatgtaaaaggggaatgctttgaagcgcctatctttttgaatggatatgggcaaaaatacgcgactctaatgccatcgcttctctcaagcatggtggcgatccgtctttgtcctccctttgtcagcttttgagtctgcttctttaagtggctgcgccccttttaaagcaatttctttccgtccccgtgatccgcttccgctcccgttaccttcctatcttggatttctaaaagcaatgtggtaatatcgttatgcacttgtttgccctctttacttcattgtggtgatttaattttaggtgacagggaatactagtgctatctttttgcacaaaaatatccattgaagaggctactccccgatggataatatagagcctgtttagtattggtggtgttaaatgaaaaaaatgtatttgctttttttgagcggattatttttatttataacaattattccatccattgactctagaataagtcaccagaaatatatcaataaatttggaatgttcaatataaattcaaacgaggcagaagcaagaagaataaacgatacaaattttgaaatttatgaaatagtctttaaatctaaaatggactataaaaaatttattgagaatttgaataagacagaaaatacggtcaagtatgatccgattgcagttgaaaaaaatgagaacataaaaaacctattaatggaattgaagcggaaaaaaatcattagaaatgaagtagatgaagtgtactgcatatataaaacgatagaccatgaaatttatgcagatattatttttactgatttggcaagtgattcgtgttattttatgatagactttaaatgcaatgattaaagtttacttttgatacctatgttaaggatcgttgctttgcgctgatgatgaacgaatgagaattagctttgggttctaaatcggtagtgagaacctatcattgattttttgtagacttttttctcgaccttatgtcaaccattggggagtttagtgaaaactagactcctttttgttttcctaaaagccactcatcaccgatcttttgaacaaatgaaaagtagtttcgttgggaaatgatacgcttttcaccgtcttaatcttgttgtgtgttcctttcctcttcgagaaatcaacgctgccgtaagcactctaaaccgattcttgtagacgcgtaagcaactgcgccgctccccttgtccgcttttttcgccttgcctgttccatggaaaaggggaatgctttgaagcactatctttttgcacaaaaatatccattgagaagttactccccaatggataggacagagccttttaaggtagcgaattaccgacttttgttgcggagttcatgaatgaacgaaagtagggtatcgtaatacaccgcaccatccaaagcaaaaattaaatagccttccggcgccggcacgctttgtgcgatgggcatgtcgctttcaaggacgagggcgcggcgcttggcgtcgtagggaaggattttcgccggggcatccagggtaaagcggcccgccttttccacgtagagcagatcgtcgtattgcacgtagcggtccatggaggcatcggtctttcccgtgatttgaaaaggatgaaggctgaatccgtcgatttccacatcgccgaggcgcagccggctcttcaactgctgtaaatatttttctgtcgccgccatggcattcagattggtttttatttgctccacgagggcctcaggcgtcgcttctttaaagaagggaaggaaatcctcgccgacgcacacagatccctcaaaggcgccttgaagggccaagcttgccaggcgataggaggcgaggggcgcgatggccgtacgttttttaatttcgtcgaaaagatccgccgccacatccaggcgctcgcgggctttttttgttaaataaggccaaaggatgcgtgtttcaaattgcccgtgaaagagatatagggtattctgtataggtaaagactccaaggcacggtttaagggggcgatccaatcctccgcgggatctgcggcttccgcttcgatgatgaaatcttccccgagaaagccgtaggctacagggcgcgccttggggccgtaatgagaacaataaatttgtaagaaataaaccataatttcctcctggggcaagtataccacaggaaaaggaggtaccaatgatttacttagataactgcgccacgacgcggccgctgaaatctgtcatcgacgccatgaccacggcattgcaggaggatttttccaatccctccagcctgcaccaattcggctatgccgtgagcaagaagaaggaagctattcgcgaaagcattaaggactatttcaattgccgaggcggcgagctgtacttcacctccggcggcacggagtccaacaatacggccattcgctccgccatcgaaaataagggcgcgggaaaaaatgtggtgacgacaaacatcgagcacccgtcgattttaaatgtcattaaagcatcggagatggagctgcgccaagtggccatcgacgaaacggggcacatcccttttgagaaactcatggctgccatggacgaagacacggtgcttgtgagcctttttcacgtgaacaacgagctgggaagcatcaacccggtggaagaatggattccgaaaatcaaggcggcttacccgacggtaaaggtccacgtggacggggtgcaggccgtgggaaaactccccatcgacttcgacgccatgggctgcgacacctattcctttagtggccacaagtttcacggacccaagggcatcggcggcctcctcgtgaaaaaatccgtgaagccctttatttacggtgggggacaggaaatgggcatgcgcagcggcacggaaaacattccgggaatttacggcctgggtgccgccttcgacgcgttgaaagaagagggcatcgccttggatgaagccgaagcacgcatggctcatttaaaagcgggaatcgaaaccatcgacgcgatttccataaacagccacgcgccggcgagcccttatattttaaacgtgagtatagccgacacaagaggcgaggtgcttctccatatgctggaggaaaaagaaatctacatttccacatcaagtgcctgttccagccatcgcaccggaaaaaatcccgtgttaacggccctgggcctttcggacaattttgccgaaggaaccattcgcctgtgtctgagccgagaaacgaccatggaggaatgcgacgcattcctcgaggccttgaaagaagcggtggagaccattcgctccattatgaggaggtaatatgaagcgtatacttagtttaagcttaggtgaagtggttttaaaaggcgccaatcgccgctattttatccgcaggatcattcaaaacatcgagagtagcttatccgatgtcgggtatatagacattaagccggaaatggggaaaatccaggtggaaatcgacccggcggtggaggcgacggccattaatcgcctgcgcttcgtcttcggcatcgtgtatatttccccgagctgggcgttcgaaaaagattgggaccggctaaaagaagagacggtcaactacatcggtcggcttctcgaggaacaaccggaatataagacttttaaggtcgtggccaaaaggagcgacaaagccttcttcaaaaattcccaagaggtgaacatggatctgggcggggtgattctggatcacttctcagatcgcctggcggtggacgttcacgaaccggatttctatctctatgtcgacattaaaaacgagatgtatctctaccacaaaaaaatccctacctacggcggcctgcctctgggaaccaacggcaagggcctgctccttttaagcggcggcatcgactcgccggtggcgggctttttaatggcgaagcgcggcgtgcaggtggatgccctgcatttccactcctatccctttacctcacctcaggcggaagaaaaggtgatgaatttggcgaaaatcctagcccgctacgtggtgaagatgaatgtttacagcgtaaatctcctgcccatccaaaaagaactgaacaaacactgtccgccggaggagatgaccgtcctttcccgtcgctttatgatgcgcattgccaatcgcctggcggataaatacggctacaaaagcgtgattacaggtgaaaacctgggtcaggtggcgagccaaaccatcgacggcctcacggtgatgaacgacgtggcggagcgcatcgtctttcgccccctcatcggcatggacaaggtggatattattcgctgggccgagcgaatcgagacctacgaaacctctattcagccttatgaagattgctgcaccgtctttttgccgaagcatccgagcctgaggcccacggtggaagacatggaagcctcggaggcgaacctggacattgaagccatgttggatgcctccatggaaacactgaaaatcacaaccatacgagcaaaggagaaccgatgaaaaaattaattcccgtactggcgattttgctgattatcggcggcattttcggatccacgtacaacaaactccaagtaaaagatgaagatgtaaaccaagcctgggctcaagtggaaaacaccatgcagcgccgggcggacctgattcccaatttagttgaaacggtaaaaggctatgcaaaacacgaagaagacgtgtttacaaaagtgaccgaagcgcggagtgccgttaaggccgcctccacgccgaaggaatacgctcaggccaatgcgcaaatggatcaagcggtgaaaaacatcaacgtggtcgccgaagcttatcccgagctgcaagccaacagcaacttcgccaatttacaagcggaactggccggaacggaaaaccgcatcgccgtggagcgcaagcgctacaacgaagccgtggcggatttcaataaatcggtgaaacacttccccaccaacctcgtggcgaaagtgttgggctttggtcaaagagagtatttccaagcggccgagggtgccgagaaggtgcctgaagttaagttttaggaccgagccatgaaaaagcgcctattcctactggtcctggccctgtgctttttgtcccttcccgtttttgccgcagaccttcccgaggccacggatgatttttacgtctacgacgaggaaggcattttaagcgacgaggcgaaaagcgacatcgtccggaccaatgagtcccttttcgaccaaacgggcgcccaggtggtggtttgcattctgaaccatttgcctgaaggcaaaaccgtcgaagaagcagcggtggacattttcgataaatgggacatcggcaccaagggaaaagacaacggcatcttgcttctcattgccatgaaagaccggaagtttaaaatcgaagtgggctacggtctggaaggcgccattccggacatggtggcgaaagacattttaaacgacatggtgccctattttcaggatggcaactacgaagcgggcattcaggtggcctttggcgaaatcctctcgaggctggaagaggaataccaaatcaccatcgagggcaaagacgcggtagtggagtccattgaagaagagacggatataggggaatggaaagagatgattcgcctggcgatcctcgtcgttctgatcatcatcattttcggtcgcggcaacaatcgtcgcggcggctatcgcggccccttcttcttccccttcggcggcttcggcggcggtggtggcttcggaggcggcggctttggcggcggcggtttcggaggaggaggcttcggcggaggaaacttcggcggcggcggatcttccggcggcggcggatcttccggcggcggcggtgccagcggcggctggtaaaaaccacagcatcccgacgaaaaatcaatgaatcgagagagcttttgctttctcgatttttttgtgggaatcgctccaattcgactgtattatttccgtgaaaaacttgccaagaagcccttcgtccgatagaataggagtgcagagattctttgatagaatttcgacgacaatgagcgaacgcatcggttcgcggcgccatgcccaggcatgtagcgcaatgagtgtacgcaataggaacggcaatcccgttctttttctatgtttcgtcggtttttgcgacgagggagaaggatacatgaaaaaattactggccctatggatggcagccctggtcctgatgaccgggtgcggacaaaagccggcggaaaacgagccgagcgataaaaaagcggcgcaaacaagcgaggcgggggaaacctcgcgctttcaaaccaccttttacgacaccttcgatacggtggtaagtgccattgtctacgcctcaagcgaagaagaggccaacgactatttcgagaccattcacaagcgctatcaggagttggatcacctgtacagcagttttaaaaattacgacggcatcgtcaatgttaagtccatcaacgatcaggccggcaagggcaaggtcgttgtggacaaggaattgtacgatttgcttcgcttctcgaaggatcagtacaaaaaatacggcgagacgaacatcgctttcggcgccgtcacctccatttggcaaagctaccgggaagcctacgaagtggtaccggaagcggaacgcactgccgacgacgaggccctgaaaaaaggcctgcccgatgcgaagatccccaccatggaagagcttcaggcggccaacaaacacacgaatatcgatgacatcgtcttaaacgacgcggatcattccgtagaaatcaaagatcccgagttgaaaatcgacgtgggcgccgtggccaaaggctatgccacggagcttatcggcgaagagctgcgggcatcggggcttgaaaccgcgctaatcagtgccggtggcaatgtgaagatcatcggctccgcgccggaagcggaacgcaacagcttcggcatcggtctgcaaaatccggaagccatcacaggcgacgggtcggcggaagagaatatgaaagatattatttacaccaacgacacctccgtggtaaccagcggcgactaccaacgctactacattgtgaaggggaagcattaccatcacttaatcgatcccgacaccctcatgccggcggatcacttccgctccgtcaccatcgtgaccaaagacagcggcttggcggattttctgtccaccaccgccttctgcctgccctatgaaaagggccgggctcttatcgacagcctggacggcgtggaagcttactggatctttaaagacggctccacggcctttaccgacggtctgaaaaacaagctcgacagtcagggggcgacaaatgcgcaataatttgctcattttcaccatggcgcagctgtttctcatattgatttattcggtatttttgatttatctccatctgtcgccgacactggaaggggcgatttacggccacatgctctttcgcctgattcccgtggtcttgacggtgctggtctacctgtttgtcggccgatttatgaatgtaaaaggattgaccgacggtattttaatcgtggtcttgcctgcactgatttggggcatttgcctcgccgtggcctacttcggcggcggcgccgaaggctttgtacgcggcgcgtttcgttccttgtggcgttttcccgccgatgtgaccatgctgcctcaaatggcggcgatgagccttctcagactcaagccaatgacggcgatttacgccgcagcggccttaattccccagtgcctcgcccttttatcagcggcgagaggtcccgtgacgtaccgacgccggcgctccttgagacgccgggaaaaatagaaagaggaaactatgtataattacgacatgaagcggttgtatgaaaccaccatcgaagcgttaaaagataaaggcatcgaaatttccgatattgcagccatcgtttacgatctgcaaaaagattatgtacccgtcaccatggagctgtgtgaagaacacgtcctggccgtgcttcggaaaagggaaaccatccacgccgttttaacggccctggccattgataaggccgtggaggaagagcgctttgaagagcccattcaatccattattgcaaacgatgaaggcctttacggcatcgacgaggtgttgagcctttccatcgtcaacatctacggctccatcggccttacgaatttcggttttttagataaaaagaaagtcggcatcatcgacgaattagataagcgaaaaggcagtgaggtaaccacattcagcgacgacatggtggcagccatcgccgccgcggcggcctctcgcctggcccatagcaatcaaatcaatgaagagggtaagcaccatgaagcgtaaactcacgacccattggatcgcgacgacagccgtattggcggcggtgtactacgccctgaccgtggtctttgcgcctatttcctacggccccgttcaattccgcgtgtcggaaatcatgaacctcctggccttttacaatcccgccttcgcgccgggcatcgtcctcggcgtcttcctttcgaatataagctcgcccctcggcctatacgatttattcttcggcacctttcacacggcgatcagcttgtattttatgtgtaagctccacaagaagtgggtggcaagtctcatgccggccctattctcctggattattggtttcgagttggttcttgctttcggcggcggaatcgtcggatttttgaccatgagcctatcggttgcggccagtgaagtgatcatctgcaccttgatcagcctgcccgtttacgaagcgttggacagaaatgcggcttttcgttccattgtcagcaagaatcctcagtaggtaaattcagaaggagagtgtatgagagtaaaagtctgtgtcggcgcccgctgcaccatgatgggcgccagtgctgtacttgacgcgctggaagatcttcaggaacgctattttaaagacggcggcttggaaatcgtccacgtcaactgcatgaatgtatgtagagaaaagggcgtgaattataccccggtcgttgaaatcgacggcgaacttttcactacggtaaaaccccacgaaatttcgggcgtcatcttggagcgcaccggaatacaaacaaaataatcgatcattcagaataagaggaggtaaaaaatgaaagaaagttatgccagtataatgagccttcgccggcgtgtatttgccgaagttgcgaacatggcttatgcggacaccccgctggaagaattggaatccgtcggctaccgtctctatcccggaacgtctccggatgatcgggaggatttattcagaaagcgtgccatcgtagaagaaatgacgcgtctcgccatgggtatgaacttgcgtgattacgacgagtacataaaagtgaccgaaggcttcgacgatgtagacgtctccacgagcatttttaaaacacccttggtacacgtcattaaattcgcctgcgaatcctgccccacccgcgcctttaccgtgaccaacaactgccgcaagtgtatggcccatccctgtaccaatgtgtgcccggtcaatgccgtgtccatcggccaattcggcgccgtgatcgatcaagataaatgcgtgaaatgcggccgttgccaacgcacctgcccctacaacgccatcgtcgaatacgatcgcccctgtgcatcggtttgcggtgtaaacgccattggaagcgacgataaaggtcgcgccattatcgatcacgaaaaatgcgttggctgtggccgttgcgtggttcaatgtccttggggcgccatcggcgacaagaccatgatctatcaattggtcaaggccttgaaggaaaagaacaagcgcatctacgccattcccgcgcccagctacatcggccaattcggtgccaacacctcgccggagcaaatccgcgccgcagtgaagcaattgggctttgaagacatggtggaagtcggcctcggcgcagactacaccaccctccacgaagccaaggaatacctggagcgcgtgcccagtgaaattcccttcatgggtaccagctgctgccactcctggacgctgcttatcgaatacaagttccccgaactgaaagaatacgtctccgactccggaagccccatgcgctacacggcggaacacattaagcgcaaggatcccgatgcactcgtctgtttcgtcggtccctgtacgtcgaaaaaagtggaagccattacaagtgaagtcaaagactatgtggacttcgtcatcaccttcgaagaactcatgggtatgttcgtggccagagacatcgagccctccgaaattgaaggcgcagcagaggaagaagaatcctcctcctcggcaaaaggctatgccatggccggcggcgttgcggcggcagtaaaagaagtggctgaaaagatcgatcccgaacgccacatccaaatcgaaggcgccaactccctgaaggaatgtatccgcatgcttcaaatggctaaggccggcaaaaaagacggcttcctcttagaagggatggcctgtgaaggcggctgtatcgcagggatgggcaccatcgcctccacgacccgcgttaaaaaagctttaggcaaatacatgaaagattccgaatatcaaacgcctttggaaaacgtcctgatcgacgattctttaaaggacttcagctgatcggtcagcgaataaaagattaaaataaaaatctaagaaaaggcatttttcttctgtagaaagatgccttttctttttttatcggtcggctataataagaatgaaggcccgtgttcatccttattaatagaatcgaggcgcatgatgaaaacaaacgggtattttaccatgaccgacggaacacaaatcttttacaccctcttcggaaggggcgagccggtcttatttttacacggaaacggcggcaacagtcgcttttttaaataccaggtacctgactttaagtctcgttttcgcctgatctttctcgacagccgcgcccacggcaaaagcaccaatcacggagaaaagctaaacttcacccttatggcgaaggatacaaaagaggcactggacgccttgggcattaaaaagaccgccatcgtcggtttttccgacggggccaatttggccatggcctttgccgccctctatcccgaggcagtgagcaaactggtcttaaattcggggaatctttttttcagcgacacgaaattaatcgggcggatcacatcctatatgcagtacgccttcggcgccgccttaaacatgatctccgaaaaatttaaggacacccgccttaaggccaagcttctcgtgaaggacccggacatttccgaaggcacccttcgccacctaaggtgcccggccatggttatcgtcggcgcccgcgacgtggtggaaaccgcccattccaaatacatcgcctcattgattcccaattgccgctacgtggaagtggccaaagagggccatcgcctggcgagaaccaatgcgaaggtatttaatcaaatcgttattaacttcttaaaaggagcgtcatgaaaaaactcttcgaaaccataaaaaaatacggggagcccctatttgtactcagcgtatttatcctcgtcgtcgtggaatttaaaagcctatccaaggaaatttcctacgaccgcgtggtagacgccttggggagcattcccttttataatgttttgctcatgctcattgtgggcatccttgccgtcgtgcccatgattaattacgacgtgatcttcaatcgcctcatcggcaacgacatggacaagcgcaccatctacgaaaccagctacaccgtcaacaccatgaacaacctgatcggtttcggcggcctcatcaatatgggcctgcgccattacttctacggcaggaagaaagacaagatggaaatggtgaaagtagtggtggaaacctacttttactacttaatcggcatctccgtcttgtgccttttcggcctgttgtatctgtattttcaccgggaatcgacggtggcgatctacctgccctggctaatcggcggtttgatttactctccggcggtgattctcttttccaaccgcaaaaaagacgacaaaaaaagcgtgccccactgggcacaaagggagctgctttgcacctccgttttggaatggatcggcgccatcggcacatttttgcttatcggcagggccatgggccagtcctttcacgtggcggaagtctttgccctggtggtggccaccaatttaatcggcatggtctccctcatgcccggcggcttgggttccttcgacctgatgactctcgtgggtctggggaatttaggcatcggctacgaaaaagccttggcttggcttctcttataccgccttttttactacgtcgtgccctttgtcatcggcttgtactttttcatcaagcacttcggacgcagtttcaacgaagaaaacgacggcgtgccggcggaatttgccaagtccattgcccacgacctctgttcctttatgatgtatctcttcgggatctttatgattctctcggcaaccattcccgataaagtcaacaccatcaaattcttggcgaaactcaatcccattcacgccaacattttgtaccaatcgccgagcatccttctgggcctggtctttatcttcctcgggcggattcacgtggagcggcaagaaaaagccatggagccgaccctcctctttctggctctaacctttgtctacgccgtcatgaccggcttcgggctcattacctacctttacctgattctgctcacgattcttaccgtggcaagccgcagagatctgtaccgcaaacaattcatctatcgaaaagaaagcctgtttattgacttgggcatcgcccttttctttattaccatgtacctgctgtccatcgccaacaaagcgaagggcatggggcttttgctgaaggcacgggaatttatcgtcctgccctttgaagaaaactggttgcgcatcagcctcatgctcctcattaacgccggcgtactctgggccatttaccgctacgtgcgcggcgaaggcaaaaccctgggcgaagcaccggacagtgcgcgcgtcgaagcccttttaagggcctacggcggcgatatggatgccggtctcgtatttttgggggacaaggacctgtactggtatcaagtggagggagaagacgtgtgcgcccttcaactgcggacggcccaagaccgagtcatcgtcatgggcgagcccatgggcgataaggcccacatgaacgattgcgtcagggaatttattcgcgaagttgacgtgctgggctacgaggcggtcttttacgaagtgtcccgggagctgattatgaagctccacgactacggcttccactttatgaaattcggcgaaaccgccgtggtagacttggaagagtttacattggaaggaaagagcaaaaaggcttttcgcaatgtgctgaataaattcgccaaagaaaatatgcacttcgagatcatcaacccaccctacgatccgtctattttcgccgatttaaaagccatttcagacaaatggctggaaggcagggcagagcggggcttttccatgggctacttcgacgaagactacctgaaccgcgggcccatggccgtggtgaaagacgaggcgggggcaatcatcgcctttgccaacctcatgcccgtatacaaagaaggctgggccaccatcgacctgatgcgctacgatccggaggacgcccccagcggcaccatggactttatgttcttaaacctctttatgcacttcaaagaggaaggcaaaattgccttcgatctgggcatggcgcctctggccaatgtgggcattaacgaacacagctttcttgaggaaaaactggcctatttcgtgtataaattcggcagcaatttgtattccttcgagggactgcgcagcttcaaaatgaaatacgccgcccactgggaaccgaaatacaccggctacagccaccgaagcaacctgctctttacggtactaagcttggtcagaatcgatcgaaaaggcggcaaaaaagaagttgattaaataaaaaacctctctgcctgaaaaccataggcaaagaggtttgtttattacttcatcttccgctcaatgcggcctaaaatatcgtcgccggacataagggattttaaattgtcccggtccaaaagcagaattttatttttccgaagggctaatttcgcgtccggatccaagacggcggaatccattaagagcaccttcctctcctttacttccttggggaagtgggcgagaatgctgtctaaatgctccgcatgggccacgcctttggtggcgatgggcttaatctccacggcgtagatgcggccgtctttttccatggtaaaatcgtagggcagctcgggattgtcataatcgttgtccaaaatctcgtagccgcagcgggaaaaggcgatggccgccaggtgctcgtgggtcaactcttcttccaaaagcttcaacgcccgcaccaagtggaggggatccagcttcaacacagcagtacagccgtaggaatcctcttttttcggaaaatgcttcacgtcaaaagcgatcatcctctcctccaccacggtaaaatagccgtgggcgatggcatttcgcatgtggcgcaccaaggcggaaatcttcgtctcgtgctccccggtggtgagaatcatcttttggcaattggtgcatatagaatccatataataatccacgatgtcgtcgtcgatgtaatccaaaaacaagatatcctccgcgttcaggcgaagggcctcggagaccaagccgaaactgaagtcctcgtaaaggggctccgtaatcaacacattggagggggactgaaaggaattaatattgggcacataccacagcaggtattccaaagcccgggtaatggcctcacttaaaggcaaggggcgaggattgtggacgatggaatattctttttttatgtgatggtcgcagtcgtaggaaaaatacttaaagtgggggagatggccgtttcggttcaaagaagtcacatcctttcttcactccctttattatagcccgtagaaaaaaacttcgccaatagagaaaaaaccgcagaaatcagcggaaagcccttgacagaaggcggtctttgctctatactaattgctagtgttttaaagccccggaaacttttgaacattatcccttttgatatagcaggaggtcatctatgaagacaaccatggctaaagccaatgaagtagatagaaaatggtacgtcatcgacgccgaagataaagtcctcggccgcttggctaccgaagtcgcgaacattttacgcggcaagaacaagcccatttacaccccccacgttgataccggcgacttcgtcatcgtcatcaatgccgaaaaggtcaaattaaccggtaacaaatgggaagataagattcacgcatcccacaccggttatccgggtggacgtcgcgaagtggcttacaaagaaattcgcgaaaagcacccggaacgcgtcatcgaatatgccgttaagggcatgctccccaagagccgtttaggtcggtccatgttcggtaaattaaaagtttacgcaggtccgaaccatccccacgaagcgcaaaagccggaagtttacgaagtgtaaggaagggtgaatcacatggcagatcaaattagagcaacaggtagaagaaaaacgtccgtagcccaagtcagactcctctccggtagcggtaaattcctcgtcaacggcagagaactggaagacttcttcggttacgaaaccttacgtaccgtggcaaaagaacccttaaccattacggaaaccgaaggccaatacgacgtcctcgtcaaggtcaacggtggcggctacaccggacaagccggtgccattcgcatgggtcttgcacgtgcactgcaagaagccaaccccgatttccgtgccgttcttaaaaaagcaggtttcttgacccgcgacccgagaatgaaggaaagaaagaaatacggcttgaagaaagcacgtaaatccccccaattctccaaacgttaagcacagacagacaaacaccgctgcgagcggtgtttttttgcattagaaaacccccggttagaccgggggttccgtttagctttagcgataattgcccgttatttccagcgtgatatgatgagagaggtctgccaaccaatcacaatcaggaggaaataatgacatcactaaatcacacccatagtttatcacacacaaaatggaattgtaagtatcacgtcgtgtttgctccgaaa

SEQ ID NO: 52 - DNA, 18123 bp, Peptoniphilus rachelemmaiella
  source 1..18123: mol_type = genomic DNA
ttgcaatcaatggtaatcaggcgtctttcttctgaaacaccggtgacctcgacatcttggattcctaaaagtaatgtggtaatattgttttgcacttgtttgcccccctttattattttgtggtgatataattttaggtgatagggaaaacaagtgctatctttttgcataaaaatatccattgaggaggttactccccaacggatattatagagcctataaaatcataactgtccaacggcagcagtcgagataaaacggatactttggcagtccgaatctcattattttttttataccttagcccatacatctgtaattctttcaaacgatttccacgagcatataaggatacatctgctcccgcttcagaaatcaaagccgcataaagacttcctatcactcctgcaccataaatcaatactctcatcttaacggtccttttatgtttcttcctaaatttcgatgtattttacgtatccaaacaaaagctcactatccatttagataaatgacccgaaaattcacctttataatattccaacaatcaaagcctgaaccgccgctacaaacggtataattaaaaacggagtaactacaaaatgttccatgattgccaaatgcctcatccagttactgaattcataatccggatgtccctctgtcccctgaatgacgattttatccttatatttcccttggaacaacagacaatccaacaaaaagaaatctcctaagtttaatatgctccactgaatatagcccatccaaaaaagattccaaaaacctgaaattccagtatggaaaagacttgctgctgaatatatgaaacaaatcccgcaaattataattgttagaatgagatttatgtttttctctttttttgtcatctttctttttcttgatacacttgtttccaaacattcccactccacatatcgggcattttacaattccagaaagcaagtgcgtgcgtgtatcttttcctttattcacatgctcatatttctttgcttgagattttagcttaacctgagcagtttgccaaacttcatcggaaactatagcttcatgtatcccttcagatattagatattcaccttgttcaacctgcttatattcatttcttgtaccatgaattttttctaaagttcttcttccgaatgctattttcccattatatacaggattctttaatatctttcttataagacctgcatcaaacaaaggattcttaccattctatcttgggaattttctaattccatgattctctaagtatttagatagcccattggctcctatcgtagtatttacatactggtcgaaaatcgttcttatggcaactgcctcttcctcatttataaacagcttgccatcttcaagtctatatccatatggagcaaagccaccattccattttccttcccttgcttttttaatgcgaccttccattgtttgaatatggatgttttctctttctatttcagccacagctgataaaacagaaatcattagtttcccggcatctttagatgaatcaatgccatcttcaacgcagataagattaactccataatcctgcattatctgaagtgtagacagaacatcagcggcatttcttgcaaatcttgataacttaaacacaagaacaaaaaacactccatcttttccggattttatatcttccatcattcaattgaactgtattctaccttcaatagatttgccagactttccggcatcttcatactctccgacaatttcgtaatcgttgtaaatagcaaaggccatcattcgtgatttttgtgcctctaacgaatacccctctatctgtattgacgtagatactcgtgtatagaggtatacttttattttttcttttgacatagcattaacctcaatataacttttctatatcatatgtagtttaggatttttgaatttaagtttggactatcatttcaagtatattataacgcttttattagtccgtctcaatttgtgtttttgccatgtcaaaactatttttcatctcttgattttttactggcgttggatcgggcagattatctaaatctaaaacaccagcatattttgtaatcagatttgcaattaaatcagccagtccattccattcactatccacagatatcccttcttcctttacaaactttctataatcaaaatatgttttcttctatatttcaagtttaacgactttggtaggtgcttggcagcaacataggaatctcacctccgcctcttattccagacgagccggcttaaactattgaagtctcattattactacttgtttcatcgaacaggttgccacatctgtttttatgtattcttatttatcgctcgctttcttgtttccttgatttctcagtattcataaaaccaaaatttctttcagcagaaaggtcatggcgtaagttataatcctccacaagtagataaagtcctacctttggtctactcagttgtcaaggaacaattatttgaaagggacttttctttgtattcttttcatttgaaataggcaatcttcactatcatcaataaaatacaggaagtcaaacttcccttcactttacataaggacagattgaccccccttggttaccgaattttttaatttatttgataaaatttttcggttttccattaattttgttttttataatttaaaaatcacgatataaaagcgactaagttattttattcttaatcgcttcaaaaattgtctatatgtgctttacaaagctttttaattcttaaatgtcggttgcttttaatcgtttactttttttacaatctccagcttgcagctcgctctcttgccttgataaatgctgaataaattccttctctatttatcaaatcgttatgtttgccttcttgaaccaatttaccgtcatcaatcactagtatctgatcggcttttttcacagttgaaagtctgtgagctatcgaaactacagtgtgtcctttggacaattcctcaaccgcggccaaaatctcatattcattttcaggatcaacggagctggtcgcttcatctaaaagaataataggtgcatttttaagtaatgctctagcaatagaaattcgttgtttttcaccaccggaaagagaactgccaccctcacctaccatggtgttatagccatcgggaagttccataataaaattatggcaacgagcctttttagcagcttccactacttcttcatgacttgccttaggatttgcaaagcgaatattattctctatagtatcttgaaaaagataaacattttggaaaacaagtgaaagatttttcagtaaactttctactttataatctcgtatatccctatttcctaatcttatttcaccactgtcaacatcataaaaacgagagatcaaattgattattgtcgtttttccggatcctgacggtcctacgatagctgtctttgacccttgtggaatagtaaatgaaaggtcttttaaaacaggcttccctttgtcgtaactaaagctcaccttatcaaagacgatatcctgattttccataacttccaaagtcccgtcacttatttcaggaatatctaaaacctcatccaaatattgcatattggcaggatttttaaccatgaggatggctgcattttcaagttgttttaaaccgccgaaaatcataaagccggcagctgaaacagtaagcgcttgtggtaataaaacttcccctttcgtataaagataacaagaaaataatgtaacaagtagactcgaaagattaataacagtagaaaaaattcttgcataaataacaaagacgatttcaaaatgtacttgagagagtctaagttcttcagaagcattttccaatttagaatgtatttcttcaacaacaccttcatctgcaaacggaaaactgcgaagcacaggaatcccgctaatgctatcaactaacgcatcacccacctttgtaatagctgcatgctcacgtgcaacctctttttttgcttgattaatcataagagacatgcataaccaaataagaattaaacaaattaaagttaaaaatccaattttagtatttacaccgaacatcccaaccaacagaaaaaaggatattgaaatgcctgaaacagcaaagtcgatactcattgcagagtaattttcaagactcttcataacattggtaaatgccgccataattcttgataggctttgttctgcaaaatatcccataggcgcctttttaagtttttcgccaactgcaagtctgtagtccttgaaaatgccaaagaaaacaccgtcactaagaccacttttcgcccagcctgtcaaaaaattaaaaagaaaggaagcaaaaagcactccgaaaattgtccaaatatgctcccttgtagtttcattcatccaaccgaatgcaagaaagagagcgaaaaatccaaacagcattgaagcattttgcagaaaaataagaaacattcctgccttaagacgatttttatactgtcctgccagtttgaatgataatcttataaactccatgtcttattcctcccctaaatattgtttccacaggcttgcataaagtggctcttccatcagttcttcatgtttacccttggctataatttgacctttatcgattagaattatttggtgtgcctgcttgattgtatttaacctatgagcaaccatcacaagatttttcccctttactagattcgatattgcttcttggatgagagcttcattttcaggatcggcataagctgtcgcctcatccaaaataatggttgatgcaggtttcaaaattgctcttgcaagggttatccgttgtctttcaccgcctgacattgctcctcctgcttctcctgctttggtatcatacccattaggaagtgccgtaataaaatcatgacaatgagcagcttttgctgccgcaataatttcatcttcggatgcattaggctttccaagacgaatattatctctaaggcttacatcaaaaagaaagttatcttgtgaaacaaaagaaatctcttcagcaagctgcttaaatgaaatattctttgtatccacattaccaatggaaattttacccgatgactgatcccaaaagcctgccaaaagctttgcaattgtagattttccgccacctgaaggtccgacaagtgcagtcacttctccggggcttgtttcaaaagaaatattatgcaatacctcagttccgtcatgataagaaaaacttacattatcaaattttattcccttgcccctatctatagtaactttattttctgcatcaggacgtttttgggcaggcatatcaagcaattcttgtatggatacccaagtattggaagccatctgaaaaagttcaaagctcatcatgattgcaaaagcttgtggaaggatagcaattggcagaataagtgataaaagcaatgtttcgatgcctatttgcccgttcccatataaatagaaagcgaaaggtaagctcactatctgtggtgtcatcattgcagccgtcataagtgctttgccaaaccaactttgcttccaccatttcatcgttgaaaaatgatagaattttaccgcatctgcaaactttccatacgaaactttgtcttgtgcaaatgctttgattacagggattccacgaacatactccgcacttctgtcggcaacattagcataacttgatagccacaccgccattctactacggtatttatacatcattgtaatcatcgctaaaaaaacaattggtagcggcacaaatattgataatcctatacgccaatctaaataaaacaaaataactgtgcagagtatcggatgcaaaagcttactaggtagttcaggcatcaaatgggctacccagtcttccatatccgctactcgatccataataattacctttattttacctacagaattatccaccaagtaccccattggaataacatttaatttttcaaacaaagtccgtctaagttttgcaagtatggaaaaagaggttttatgtgaaatggttgtgctgaatcctgaaaatataaagtaaaggagcagtgatcctattgcaaaaaaagcatatttcattaacgcatgaaagccgaccggattacccccggcattttttataagccatcctgctgcataagcactaaaaaaataggtagaaaaactaaaaagctctccaatgcaggcaaaaataacagaaattcgcatcctacccttatactcaggtgctacactcataagtgctttatttaaaccactcatactgattttaggttttttttcgctttgctctacatcactttcgattcgctgcataatctcatcaggaacatccaagtttaaactctctacctcttttattaaatttttattttgcttgagtttcttgctgtccgaggcagagcaaatcaactcatcattttttttcttcattaactcatctccttttcagttagcttatactaactattcgtttaaaaaaattaccttattttacctttttcataactatcaataaacagctttattatttctataaaaaactctctattatttataaagctatcccttgccccatctaagatttcacaacctagtataactgtattcataaaaaatattaaaaagtcatttgtgagatattcacacccatctttctttgcaactttaactcctatatatgtagcctttaaggattcttcgaccaaaattgggaacaaattctttaggtcatcattgtttttcgtagcctgaagatatatggcatatacgctcatgagttcactttcatcaagtactttatcgacaatcatatgtgctacagcattagcatctaactctcccgaatactctgccagaacttcattaatcttatcgactcgataagccataccttctcgcattaaatcatgtaatatttcaactttatttttgtaatggtaatacacacctcctcgagaaagcgaggtttcaacaataatatcttccattaccgtgtcagcaaaacccttccttaaaaaaacctttttagctgcatctaatatttctttttttctgatttgactgactttctgttttttccctcccaaaatatatacctctctttgtaaacaaaactgacaaaactgtcagttttattgtagcgttattttaagttagcgtcaactaactttttcggaatacactttatggtgacttgtaatatgaaatgcaacaaataaataaaataatccatggctaatctgataaagtgttactacccacaaaaacacaaagtagaagccatggattaagtatattgtaccacgactcgagaaaaaggaagccatttaacttatcaagatcgtcaaaccttagaaaggatggtcatggagaatcacaggaaacctgctaaggagagaatatcaaagagtaagatggcagaaatgcttggcgttcatcgctcaacaatcagccgagagctcaaaaggggcgaaatcacgcagcgtgatatcctgtggaaagaatacacttcctattgcgccgatgtagcacaagatctcattgattccaataccacggcaaaaggtccctctttaaagttaggtaaagatcagctcttccatgattttgttgaatactggataatagagaaaaagtattcaccggatgtggtaatcatgaagatcgaaaacgaaggactctcttttgaaaccgagatttgtacaaaaaccctctacaactacatcagtaaaggttacttcctcaatctgacaaatagaaacttaccccgtagaggtaaaaaagtcaaaagaagatatcaaggagcaggaaatgtattcaaaagaacaacgagaaaccgcattgcaactgcatgatgagtttcaatcagttactaaagtcatacaaaagcttggctatcccagtcggcaaggtatgtataaatggctccggggacgctcaaatcctcctgaggataaagcagagcgcaaaaggataaacaactctaaagagcatcctttgcatccttctgtagagaccaagttcgcaattttagagcgttgttttatgaagggctaaaacgtacaattggtttctgaggaaaccggttatagtcggacatcaatctacagatggagaaaactatatgtatcacagggagtagccgcactaatgaatgaaaaagatagaccaagaggagaaccggaagagggccccaggcctcaaaggatgaaatagtagagctaaaacagcaaatgctcgaaatgcaaatggagatagatatcttgagggagacgatcaaagtcataaaaaaagacccgggcgtcaaccggaaaacctgaacaacagggaaaagacaacgatcgttgacgccttaaagaaccgctactcgttgtcgcaattgctgtcaatcctgcatctttctcggagcagctattattatcaagaggcaacacgcaagaagccgaataagtatactcgcttaagagttcgtattgcagagctctttgccgaaaatcaaaagtgttacggttatcgtcgcattcatgctttgcttcagcgtgagggcattaccgtttcagataaggttgtccgccgtatcatgagcgaagaaaatcttgtagttaccgtaaaaaggcggaggaagtacaactcctatcaggatgaggtttccccggctgttcctaatttaatccggagcgacttccatgcagagcaaccgaatagcaaatggcttactgatataacagaatttgccataccggccggcaaagtctacctgtctccaatcgtagattgctttgacggtatggtttgcgcatggtcaatcagcgtctctccggacgctaaactagttaacgagatggataggctacactaaataggacaaaataaaatcgaacatgatatactaaacaaaatagtaaaacccaaagaaaaggagacaaggaaatggtaaaacattacgaagaaaactttaaaaagcaaatagtagaaatatacaaccaaggaaactatacatacaacaagctaggagaagaatatcaaatagccccatccacaataagaggctgggtaaaaaggtacaacaacacacaatcatttgacataaacgacaacagaacagaagaagaaaaagaaataataagactaagaaaacaactaaaacaactagaaatggaaaatgatattttaaagcaagcagcactactgctagggaaaagataaagttcataatctcaaacagagaaaaatatagcattagtgcaatgtgtaaaatactaggaataacaagaagcctcatatactaccaccttgacaaagaaaaagaacaagaacaaaagcccctagaacaagaagagcaaatagaaaaagaaataaaagaaatatttagaaaaagcaaaaaccaactacggaacaagaaaaataaaagtagaactagaaaataaaggataccaagtatccagaagaaaaatctcaagaataatgagagaaaataagttagtatcaaactatgcagtaaaagaatacaaagtagaaaaaacagtaagtaacgaaagtaaaatagacagacaatttaatgaaagagaaaaactagaagcaatagtaagtgacctaacatacgtaaaagtaggaaataactggaactacatatgtaccataatagacctgcacaacagagaaataataggctatgcagcaggatcaaagaaagatgcaaacctagtaaaagaagcaatatacaacataaaagaaccattaaacaaaataaaaatattccacacagacagagggaaagaatatgacaacaagaaaatagaagaaatcctaaaaacattcggaatagaaagatccctaagcaaaaaaaggaagcccgtatgacaatgcagtagcagaaacaataaacaaagcaatgaaaacagaattcatataccaaagaaaatttagaaacctaaaacagctgcaacaggaactagcagaatatgtctactggtacaacaacataagactacatggatcattaggatacatgagcccgagaaaatacagagaattagaactgatttcaacaaacaaataaaatatatggagaaatagtcaagggcgaatcgtaagattctggcgtagccgaacccttgactatttaggaatatattttagaatgttttgaaatcagtctaatgatttattcgattttgaattgtcctaaaaagtgttgacataccacagtttagtcttgctcctgtgcagctgcctccttcagccgcaaaaagctctcgtcgctaatgatgtgttcaatccggcaggcgtcggcctccgcagtttcagggtcaacgcccgctgcgataagctgctcagtgaaaaagcaatggcgctcgtagattttttcggcaactgcccggcctacatcggtcaggtgcaggaaatagtcgctgtccatcgtgagaaagccaccgtcccgcagggttgctactgcatggcacacactgggctttgacacctccatgtgccgagccacatctacggagcgtaccataccgagtttcttttgaagaacaagaatggtttccagatagtcctccccggacgcatgaagtttcattaagacctcccttatgcagataatttctgttcggcgttccacatggccgcatactttccgcctttagccagcaattcatcgtgagtaccggcttcagcaatctttccgccagataccacaaggatttgatctgcatttttgacgatggaaagggtatgagcaatcattaccacagtctttttctctttcagcagattggcgatggcctgctttactgccagttcgttctcgatgtcaagggacgccgttgcttcatccaaaagcaggatcgggctgtttttcaggatagcgcgggcgattgaaattcgctgacgctcaccacccgagagaaggtttccgttttcgccggtcggcgtatcgtatcccttttccatcttgcggatgaagccgtcacaattagcctcccggcaggcagcctcgatttcctcgtccgtggcattggggcgggcgtgccggatattctcacgaatggtatcatcaaagagaaatacatcctgatctaccatcgaaatttgttccaacacacgctcagcggatatatgactgattggcttaccgccaatacggatttcgccgccagtcggctcatagtatttggcgatcaggttcaagatggtggatttaccggaaccggaatcaccaacaattgcagtcaatttctgatttggaactataaaggaagtttccttcaaaactgcttcgccaggaatataggagaagtccacattatcaaaaacaatctcataattcttaactgtgaacggttctgtactgccgttttcttctggctcatggattacttttaaaatattgttttttgaaatcacaaggtttttgtagctaaacaaatctactgaaattgccccgattagctttgccagcaacatagggagcatacataaaagcagaaaatcaatcgtctgaatttctcctgccatccacggagaaatcccaataaacataataaaaggaaccataagccagttaataatgttaaaagcaaagtttatgggaataccatgcgcttcatattcaaagctgacctgactgaacaattgcattgcttctgtggttgccttattttttgtgccagccacgccgtatgcacgaaacgtctgaataccttctatatattccacaatgctgcttactgtttcagatgaaaccttattttttctggttccatacttttttaccgttcggaaagaaagccacatttcaggaatcagcatggaagtagaaagcaaaaggatccctcctgcgggcagatacaaataacagataaatacaataaccataacggccagagcaatatttttggtcaagttacttaccttgtgtgtcaatatttgttcataactatttacatcgcatgtcattgtatttacatattgccccacctgcccatgtgtgaagcgaaagagaggaatcctcttaaatttatctccaaggaaaaggcgaagattttttgaaacggcagccccgccgatctggttctgtgtataacctatactgtaaataagcactcgtaaagcatagactacgcacagaattcctgtgatcgttaagatgtctgttgtagttgttttcttgccgagcaggatctgaatgactaggtaaatcgtcatataactgcatccagaaagaaaaccttcaataaccgtgaatatcacgcctatattaaagtggatatttttatgtaatggccctgtttctttcattatgcttcatctcctttcccgccatagacgatttttcttgaagcattgtaatcgctccatgcctttctataataattatttctggaaaggacttcttcatgggtgcctgcatcggttatcgtgtgattttcgacaattgccactttatcacacattttaactgcacccaaacgatgtgcgacaatcaaaacggttttccctttgcaaagattctcaattgcccgatctatttccaactgattttcgggatcggctgcacttgtggcttcatctaatatcagaataggagcatttttaaaaatagctcttgcaatcgctatcctttgtttttctccgccagagaaacgggagccaaaactgcctactttcgtatcatatccatctggcaaagacatgatgaaatcgtcaatctgtgcctcttttgcggctgccctcacttcttccagagtggcgttactgcccatacggatattctccaaaacactgtcgcgggtcaaaaacgtcttttgaaatacaatggatatgttttgaagcaatttttcatagtttatgttttttacatttataccgccgattaatacctgaccttcctgcacatcgtaaaatcgggagatcagctcaatgactgtgcttttaccagcaccggaaacaccaatcagagctattttcatataactgttcattgcttatatctatttctgataattggttctttttaagctacagccccttaaaacaaatagccaagaagtcgaattgaacattacaagttatgaatttctagttaaaccaaaacggtcagtaaatatgccaaaattagaatcacgaaaaagaagattataacttttgtgatctgacttttcgcattaaacccaaaattatcatatcccttggctccaaccgtctgtggataaactttagttggtaattttaacttggtaagcatgagataatcaaaaaatataatatcaaaaagcttatatccttcaattcgtaagacttttttactttagtactgcttgaatttttattatttcaattatgtttattattttgcagtcaatagtgataatcattattgacaatttcccccagatgtgctatcctataaatgtaaataatatacaatgaggtgtatgtatgaaactaactcaagaaataaaagacttaattggtgaacagcttgcttatatagcaactgtagatgagaatggtaatcctaatatagggccaaaaagaactatgagggttcttgatgatgaacatctcatcttttgcgaaaatacagatggcaagcaccatgccaatattaaaaataatggcaagatagctatcgcctttgttaaaagagaagacaacaagggctttaggattgtgggtgcagccaaatcttatacagacgaagagcatatgaacctagccaaggaaaaggctggtgtaatgccaaaggcggctgctgtaatcatagatatagaaaagatctatacccttgattcaggtccaatagctggaaaattattagaagcctaattcccatagttattaataattctacaaaaaagtttggtgcacggattatttcttgtgtaccaaacttttttataaatgatgaattgcaaataatattgcgacacctaagccaaactaagttcgtgcataaataaatcaaatggagtttgatattctagagggtctgtaaataattttgtgtatcaacctaaatcatgataaaagggcaaaggttgatacatttttttatgtcagtatttagccattcctatagtaatggttcttgtcttgttttttaggtatgctcacatattagattgaagtttctttcgcttatatttccctctaacctatcttcatataactgttcatggcttatatctatttctgataattggttctttttaagctacagccccttaaaacaaatagccaagaagttgaattgaacattacaagttatgaatttttagttaaaccaaaacggtcagtaaatatgccaaaattaggctcacgaaaaagaagattataatttttgcaatctgacttttcccattaaatccaaaattatcataccccttagcaccaaccgtctctgggtaaactttagtcggcaattttaacttggtaagcatgagataatcaaaaaagataatatcaaaaagcttatatccttcaaatagtattaaaaatctaacaaaggcttgctgaaaagttaaactaaattttactgtatcaacaattgcccagcctagaacggctgcaatggctagcaatccaagtatcatgataagtccgccgattatattgacccaaatcggtttatctggcaacttactcatcataactttgatatcatcaggtgcgccgaaatgcttcgagccaaatttcggtataataagtataaaattcaccatcataattgatgctgttaagcagatgattgttaacataccaagtgttttcatcaatttagttcacctcctctcttgaagtataaaccatttcgtaaatgggagcaatttttcttagttgtgtcaactaaattcgtataaattttcttgctagtattagtgctatacttttttacaatttatatagttatttaaaatctataatcacagatgtcttcttgtcaatgtcattatacacatacaggtcatgtattaagaagttttgtaaattctcaaataaattactcacaaaactttggattccaatctaaaagatatttacaaaatcattgacaagatataaaaacaccctatataaagattttctttgatcccttgtaaatcaagtgtaaagaactataagaatttaaatctctttttcaaattcatcttcaaaactaataatatcattaggagtgcaagatagagccttacatattctttctaaattcttaaatgtaattggtttatccttgcccatttgtgccataacatttgttgttagtcctgccatagctattacatctgttttctttaatccttttttcgctaactgtatccataatggtttatagttaagtgccataatatccctctttttctcttcattagatttatttaattatagcataaatattgatttcattcaatcttacattgatttagtgttttgttttagagaatttgttgtgttattccgtccttattttgccataaattgcttaataccttgagacttagcaccaggattgtcattgccatatccttccatcaggttgataacaccccatgctcctaaacctgcaccaattgcagttacaagtgtctttaaaactccaactccagctgtaaaaaattccatattatctcctcgttttctttcttattttctattttgtttagtgatttaactataaagttcttgtagaccttatctccttttttgttttctttgaaatatccaaagacatggattagatctccttttccaaattcttttacaatttctaccttttctccatatactgagcaatttgtatattctttgccctttccatatttttttacaagagcaaaatttgctacttgaacactttctccatctttttcaaattctgaaaattcagcttccttaactaaatttgcattaatatttatcatttctctatccattaatttcttctccttaatctaaaaatttcaattaaaaaagcgactgaacttataattcaatcgctaaatgtcttatatattaaattgttttaagtgggacttcttatccttaccatcttaacctcctaattttgagtataaaaaaagacgatagagtttttaatttctatcgccttaggtactaattccatttaattttttaattagataaattgaatttgttatacaataaatttacttgctaacttatacacttgatttatttctttactttccaacttccagctattgagttcagctttaattaattctggaaattttttgctaatatctcttaaagcatttccaaccgattttcttacatattcactcgaatcttcttttaaattgaccaatctttcaatagcttcattcggattttctttgaaatatggtctacttgtccatattcttaatccctctgttactgctctcctcgtattcggattttcattttctaaccattcatcaattattgggagtgctttttcatatcctattttcttgcaaaattcatcgaatgcctttgccaatacttcctgaactctccaattgtcatctttggaaacttcatctctcataaatcttaaaatttcttcatatgatgataaatatccaaatagaaacacaccatacattctaacttgatatacattggacttataagctaaaaatgccaattttttgctatgttcattattattagatttataatcagcaaaggctcttttttcatgctctttaaagccgttttctatcaaagagaattctttttctaaattcaaaatatattctttcaattatcctatcctcctcactaaattcagatctatttatataatcttgtatttatagtctgcctattcagttttacttttccttttcgtttaatgcatctttcaatgtcaaacaaattcttctcatcaaaatcttccaataacttgtaattcttatgcttcgtaatatcaaatttatcagataagaaaggtcttactccataagcaagttcaagcacctccatatctttattcaaatgaggactaagatattcacaaactttatcataaacctctttatcttttttcataaaaggggcatacaacttagcaaatttatcctaaaattttttgttgcttttatcaatcatttcaacgctcctttaaatataaaaatgatcctatcaatctttatatttagcctattttctaattgataccttgcaagaaaggaataatagctgttcctataccaagtaggaatgtcataaatgcagaaagtcatatgctgttattcttttctattaaatcattttgaagtgtctcaaagcatccatgatggcttcttctttttcaggtgtacactgtggaataatttgtttctcctttttagacttgttgtaatgttctcgtaattctattccacatttcctttttatctgtgcaatatataatgtcgaaacttttaattcaaatttattccaaacatattctttgatttgagcatatgttgctttgctctccgcactggtcaaatcaagctcatccagctcaatttcaatatttatatgcttatcgacatcgagtttggacaaaagcgcaatgacctcagccgtcgaatcttgccaatcgaatcaccctcgcgggcgcttctcttggagatttttggcatgatcaagacctaacatgatgagcaaacgcgaatcaatgtaggtctgatgcaaccatttgcccaaatctttgatttggtgcaaatgtctgctgacctacctctattgctacttcgattcgctgtgcgaatctcgtaccaatagggttagggcttcaacgtggcttgagtggtcagtatgaataaattttaaaaattttcaaaagcctcgtatgtgggaatatattaggctctataatatccattggggagtaacctccttaatggatatttttgtgcaaaaagatagcacttgttttccctatcacctaaaattatatcaccacaaaataataaaggggggcaaacaagtgcaaaacaatattaccacattacttttaggaatccaagatgtcgaggtcaccggtgtttcagaagaaagacgcctgattaccattgattgcaa

SEQ ID NO: 53 - DNA, 17714 bp, Peptoniphilus rachelemmaiella
  source 1..17714: mol_type = genomic DNA
attctataacctgctttttcgtccaagtattcctcaacaatttttctcttcaattcataactatattttgccattaaaaggcccccaaaggttggatttcttggtccaacttttgggggtcagtgcaatgtgccacaggggtcttttgcgttagagtcgatctttattgatttcccgcactttaaagcaggccacgtattgaccggggaggatttcttccatttcgggatctcttccacggcaggtgtcgtcgccgtaggggcagcgatctacgaagcggcagccgggcttcatgttaatggggctcggcacgtcgccttccagctcgatttgcacgcgcttgcgttgctcgtcgggatcggcgatgggaatggccgatagaagggctttcgtgtaggggtgcaggggattggtgtagaagtcttccgtggtgcccacttccatgagcttgcctaaatacatgacggcgacgcggtcggaaatgtagcgaaccatggaaaggtcgtgggcgatgaagagcagggtgaggcccagtttcttttgcacgtctttcagaaggttcacgacttgcgcctgaatggaaacgtccagggcggagatgggctcatcgcagatgatgaatttggggcgcagggccagggaacgggcgatgccgatccgctgtctctgtccgccggaaaattcgtgggggaagcggaggctgtgctcggcacttaggcccaccatttccaacagctcgatgacgcgctctctgcgctcttttttattgccgatgccgtagatgaccaggggctcggagatgatttcttctacggtcatccgcggatccaaggaagcgtagggatcttggaagatcatttgcatttccttgcggtgttccttcatttccttggggccgaagtcgtaaatgttttttccttcaaagactacttcgccggcggtgggctcgtagaggcgcaggatggtgcgcccggccgtggatttgccgcagccgctttcgccgaccaggccgaaggtttcgcctttgaagatgtcgaaatttaatccgtccacagcttggagaaagccgttttctactttaaagtgtttggacaggttttttacctgcagaatgggttcattcatgtgtcaacgccttcgctttcggataggaggggtggtacttccagcagcggcaacggtggccttcgctgtgttcgataaattcgggcttttgattttcgcagatgcgcatggcttcggagcagcgatcgtagaaaccgcagccttccggcggtttgtaaagatccggcggcgtcccttcaatggcgtgaagggtttcttccttgtccatggtgagctggggcacggcggccaagaggcgcaccgtgtaggggtgcttcggcgcggcgaaaatttcgtccaccgtgccctcttcgatgacctcgccggcatacatgacgatgacatcgtcggccatgtcggcgacgacgcccaggtcgtgggtaatcataataatcgaggcgttaatgtcgtctttcagctttttcataagctttaagatttgcgcctgtaccgtcacatccagggccgtggtgggctcgtcggcgatgagcagatgggggtttgatgccatggcgatggcgatcatgacccgttggcgcatcccgccggaaaattcgtgggggtattggttgatccgcttttccggattgggtaccgatacttttttcagcatgtcgatggcgagtttttcgccttcttctttggaaatgtctctgtgccgcttcacgccttcgacgatttgcgctcccactttcatggtgggattcaagctggtcatcgggtcttggaagaccatggcgattttgtttccgcgaatggcggtcatttctttttccgtctttgtcaggagatcttcgccgtcaaagagcactttgccggtcttgtagagggccggcggttgaggcaatagccgcatgacggcgttggccgttacgcttttgccacagccgctttcgccgacgatggccagggtctttccttttcctacggagaaagacacgcggcgcaccgcttccacttcgccgaagaaggtggcgaaggagacggataaatcttgtatctcgagaatgttgtttgtcacaatgccacctactttctaagtctcggatccagggcgtctctcaaaccgtcgcccagcacattaaacgagaacatgataagagagatcatgagggcggggaagaagatttgataaaagaggccgatgcccatgaccccgaggccgtcgttggaaagcacgcccaaggaaggttggggcggttgcagacccaaactcatgaagctcaatgtggcctccgagaaaatggcccggggcacggtgagggtaatgttgacaagaatgggacccagggtgttgggaataatgtgcttctttaagatgtagcctttgtctgccccaagggagcgggccgcggtgacgtattcgttttcgcgaagctgcaatacctgcccgcggaccataatggccatgggcacccagcccgtaatactcatggcgagaaccagggtaaagagactggccccttgatcgttggataacataaccgagatcaagataacgatgagcaaataggggatggcgtagatcacttccgcaatacgcatcataatgttgtccacgcgggaagaggccatgccggcgataccgccgtaggtgacgccgacgacaaagtccatggcggcagccaaaatcccgattaaaagggagtagcggatcccgtagcagacccgggtaaagaggtcgcggcccaattcgtcggtgccgaaaagattcacgctgttgggctccatattgagccgggcgtaatcttgggtggagtagtcgaagcctacaatggcggggccgacgaaggccatgattaacagcagaataatcgtaattaagcccaccatggccaatttgttttggcgcaggcggcggaagacatcggtccaataaccgatgaccgggcgggtaatgcgctccttgttgtcgtcttttcgagccggcgtaaagagcgagggatcgatggggttcattgcggattcgtttttcatcgcttccctcccgtcagttgaattctcggatcgatgatgacataaagaatatcaacgatcaagagcagaatgatcagcacgaaggaataaaagatcgtcgtgcccataatcagggtgtagtcccggttggtaaccgaggagatcaagaagttgcccaagccgggaaccccgaagattttttcgataacgaacgaaccggttaaaaggcccgaaagggtggtgcctaaagtggagaccacaggcataatggcgtttcgtacggcgtggttcataatgacctttaacttcgacaggcccttggagcgggcggtgcgaatgtagtcttggcccaacacttccagcatggatgagcgcatgagccgcgcactggccgcaatgggcatgagggccagtgagagggagggcagtatggagtgactgaaggtgccccagccgctaataggtagccacgccacctgcttagccacgaactgcaccagcagggtggcaaagataaagctcggcaccgaaatgccgatgatggcgaggatcatggtgatgtaatcaggcagtttgttttggtataaagcggcgatactccccagggcagggcccaaaataatggagataataaaggcctgcaaaccgatttgcgccgagacgggtgcaccgcgcttaatcatttggttaacagtttcggcttgagacttcatggacttgccgaagtcgcctttgacaatattctttaagtaaataacgtattgctcgcctaggggcttatccaaaccatattgtgcgcgcaagttttgatacacctgttccggcatttttccttctcgcgcgaagggatcgcccggcacggcgtgcatgatcacaaatgtaatggtgatgataacccacattgtgacaattgccatgagcaatcgcttcaacacaaattttttcatcgtgcgtcctttccgttttacataaaatggaaccgagatgaacaatagagagaaccagctttcggttctctctattattatccctgtcatttaattgaacttgggtttattatttcgcttcgatatccgcatagataaatctcggataagcgagaagcggtttataaacgccggtgacattgggcttttgcaatctgggttgcgtgtagaagtaaacggggatgacgggcatttcttccatcatgatcttttctgcagccttcatgctgtccatacgaaccttttgatcgccggtggatgcagccttcttcaagagggcgtcaaattccttgttcgaccatctggagtcgttttgcggattgtcggtcataaagagatccaacatgctcatcgggtctttgtagtcgctcatccaaccggcacgagcgatttcaaagttaccggccttgcggttatccagtaatacttggaattccatgttttcaagattcagttccacgccgaggttttgcttccacatttcttgcaatgcttgggcgatcttcttgtgtgcttcatcggtattgtaagagagggtgcagtttttgaagtcttccatggtcatgccttcttctttcaggcctttttccaggagttcttttgcctttgctttatcttccgtaatgaggttgccgttggctttgcggaagtctttgcctgcatcgtcgttcaagccgtaaggaacgatcccttcagccggcggttggccgccttgggtaatgttttcgacgatggtcttgcggtcaagagccatggagagggccttgcggacattcgcgttgttaaagggtttcttcgtggtgttgaattcaaagtagtaaacacccaagtccttccctaattgaagttcgggatccttggattgtacagcctttgccgtaacagccggtgccggttgaaccaatacatcgtattcgccgccttcatatttttggtaagccgtgttgtcgtcttccaaaatgtcgaattgaaggccgtctaatttaaccttatcggcatcgacgtaattgtcgttcttaaccatcttgatgttttctttgtggttccattccgtaatcttgaagggaccgttggagacaaattccgtgttttggggatcttttgcccagtcgggatttgcactgacgaccttttcatccacaggaagcaaggtgtagaacgcggtgatgtccaagaagtagggggtcggagcctttaattgaacttcaagggtcttgtcgtctaaagccttaatgccgacatcgtcgatggagcctttgccgttaaagtattcttccgcacccttaacataagtggtgatttggaaagaatagtcagaagctaacttcggatcgatgacgcgtttccacgcatattcgaaatccttggcagtcaacggatcgccgttggaccatttcaagccgtcgcgcagcttaaaggtgtaggtcatgccgtcgtcggagacttcgtaagattcagcttgtgcgggaaccagtttatcgttttcgtcgtagcgcatcaaaccttcaaatgcgtggtaaagaacgaaagattcgtgggtaccctttgcaatggccgggtccaaagtgcccggttcagatttgttgttcgtgcgtaaaatctttgttccgccggactcgccggaaaccttttggctttcagccttcttgtttgcgccattgtttgctgcgccgccacaggctgcgagcaacatgacacaggcgatgaggaccgacagtagtcgtacctttttgtttatcatgttctcctccttaaaaaatcaaatgcgtgcatgggatccgaagattcctatgtaccattccaattataatataacgttttactttagtaaatgaatttgacgacattgtcggattaaattttaatttaacaagcataaaatgggaataatgcgggataatgagcggattagggtgtcatagaaagcagatagaaagggaggtagagagcctaaaaagacagcggaaggtaaaaaaggcgacaaaaaaacagacggccctttgcggtcgcctgaaattattttccttcgcttttttatttttttatttcgtcgcctaagtggcgcagcttctctacctgttcttcctgtcccaagacgatgagcacatcgccgattttaaaggtgtagtccaccgggggattgaagagcatcttgccgtcggccttccttttaatggccaagaccacgaggcccgttttttttggaatttccgcctcgattaaattcttgttttccagataagagccggaaaagatcaccacttcctccaaatccagctccacatcgccgattcgggtgaccacatctaagaaagacataatgttgggcttaatcatgagagacgccatgcgcttgccgctgatttccacggcggagagggttttgtcggcgcctacctttaataatttgtcgttgcccgatttgctcacggagttggcgataatgtaaatgtctttgttcatgtcccgcgccgtgagcacggtgacgatattatccacctcggaatccagcgtcgccaaaagccctttggcccgcgcgatgccggcatgttccagcacgctttcttccgtggcgtggccttcgacgaccaaaatatcgtggtggcttaaatcgtccaaatctttccgattgtcggtaatgacgacgaaggccattttttcgtgaataaatttattgatgatgacctcggctaattcgccggagccgcaaatgatgtaatgatcattgagtgcggaaatttttctgtccattttacttcccttccacaaatctccaacttttccctcgacgaacatggctaccaccgtggaaaaggcatagcccacaacgcccacgcctaaaaaaatcatgaggaccgaaaacagttcggacgcattgctggtggtgccgatttcgccgaagcccaccgtggaaatggtgatcaccgtcatgtagaaggcatcgatataatccacatccagcagaattttgtagccgatcatgccgaagatgagcaaaaacgcaaatgagtaaaaggtgaatttgagttttcttttctcgtccatagatccctccttatggctacgattataatagaattcgccggaaaaagctgtctattttcgtttttttgtcagcgtggaaaaggaatgattgccggaggcaggcaaatgtaaacaaacagatgaaaaagcatggcataaggcaaatccatcattaggaataactgtcccgatagaaaaggcaagacaggcctgcgaatcagctaagtaaaatccaactgaagaaaatgacttaaacagttaagattacatctagtcgaaattttaaagacatgtctcctccaacaaaagaattaatgaaactaacccttaaaagaataatagcccatggaggtcatccaattctaagatggatgatggatgatatttttatacgaactgatcctgttagaaacatcatggcagacaaggaaaaaccatagagaagatagacggagttatcactaccattatggcacatggtagggcgataagatgtgggaatgttacgagtgaatcggattatgatgatagagggacaatagtattctaatagagggatttatttaaaaatactttacatggtagtaagtaaatgatatgattgtaatgaaaattattatcaataggggtataaaatgttaaaaagtttttttgagaatgtaataaagccaaaggacaattttggtggtcgctttatggttaagggcatgaatattggtcatgagaagttagcaaagtggggcagatcatttttaaacattagacagactgatactttattggaccttggttgtggtggaggtagaaatatccaatattttttaactaaggctaacaaggtatatggaatggattattcaaaagttagtgtagatatttctaaatcattaaacagtgaagccataaaagatggaaggtgcaaaataattgaaggagatgtatcaaaaataccttttgaagatcaatcaataaatattgtaactgcatttgaaactatctatttttggagtgacttagaaacaagctttaaagaaatctatcgtgttctaaaaaaaggtggacaatttttaatatgtaatgaaggggcttttagagatcataaaaacataaaaaaatgggctgatatgcttaaatttaaagtatactcaccagaatatttaactagaatcttaacaaaacttggttttaagtgtgagtatcatttagataaaaaagatcagattgtctttatagctataaaacaataatttatattagtgcatctacaaaagtaggtgcttttttcatgccaaaatagaggtgggaatataggacttctaaataaactatttaacagtaagggtacaagcaaatcaggagacatatctaaagaaagggagagggtatcttcatcgtattttttttggaagaacaacagttggcagaaatgtcaatgaatctactaccctgtagataatagcagcttattcatgtgtgagatttttagctgaaaccttagtaggacttcccgtttatttatataaaacaggtttatcatttgaagtagatagaatactaaaggatggaaattttcaagggtaaaaatctaggataaaagaacctaattcaatatggagatttgtttttgaagagttaaagatatcatttgagtttaaaatgagatccatattctctgaagattgattttttgcaatttttgtttatatttggtcagtcctatgagtaatacttttatattaatccctcttttttcataagagacaactctcttgaaagggcagccctattacaagctaaaaatttcgctaaatcctctctggatagtttattagaaaataaggagtcttcaccatatttatctatatatttattaattttctccctaatcgtaggtttagaatatacatctaatttgtaggttaagtatgaaatttgctcattatgcaattttataatattttccataaaaatcggcctgcttgaacaagactttttatttttttcaaagatttcgctaacatcaagggctaaaactttagaatctttttttgcaaccataaatctatcagttagggaggaaaaatttagagaaaaagaatctgacgcctcataaattctatctataatttccttattatcatctattgtagataaatcaattcttcccttcaaaactatacctgccttaaagcccttagagaaatcatatagatattcgcctttactataaattaaggttttatgatcaatacaagaaagtatgtggtgtatagtactttcgtctaaactataaaataatttacttttaaaaataatcttttccacaaaatcccccatttgttgcttctgcaactgcaacaaaatttatctctggtataattataaatgtagtgataattattatcaaggaggaagagaaaatggaaaaaaataaaattatttttgggcatgattttttaaagatgcttggaagaacaagactcagaccaggcggcggtcttatgaccgattggatacttgatcaggtacagattgataaagatatgcaagttttggaagttgcttgcaataaaggagataacctaataagagtttatactaaatataaatgcaaaataataggcatagataatgaccaagttgtcattgatcaagctttggagaatataaagcttttaggtctagacaaagaaattgaagttatgaatatggatgccttaaagttggatttcgaggatgaaacatttgatttaataattaatgaagcaatgcttaccatgcttccaaatgaagaaaaagcaaaggctcttaaaaattatcacagggttttaaaaaaaggcggctatctattaactcatgatgtggcagtggaaaaagaaagtgaagatataagaaggcaactttcaagatttacaaacatggacgtgtatcctctaaccgtagaaaattggaacaaactgtttgttgaaaattcttttagacctttttcacaaaggactggtaggatgattctcttagacagggatacaatcataaaagatgagggaccagcaggggctgcaaatttttataaaaatgcttattcagaagaaaatagggatagatttgtaaaaatgttagagaggtctaaaaattcaagcatttattatatagttttagcaagcaaaaaggaggattaggtaaaaaggaggattagatggaagctattaaaaaaatatcattaattttatgtctgacagtgcttgccttaacaggcatgaccgcttgtagcaatataaaaactgaacaaaattcagaaaggaaggaagtagctcaaactgagaaaaaggaagaaaagccagaagaacctaaggatgaaaataaaaaagttagaacaatcacagaccatgcaggtaacacggtagaggttcctgagaaaattgaaagaatagtaatagatcagattcctatcttatctacttatatggcttatcaccatggaaaggccccatatatagtaggatatgctggttctcttaagcaggtaatttcaaatacagttttaaaggatattgctccagagcttcttgatagccaaaatacagttcaagctcaatctgacattaatattgaggaaataatgaagcttaaaccagatgttattttttacaatgcttcaaataaagaacactatgaagtccttaaaaagacagggattccttgtgtaggatttgctacagttggcacaaatggaccagctgacccaatagataggtacacacaatggttaaagctcttagaagatgtatttggcgaaagcggaaagacagatgattttataaaagccggtcaagaaattgtaaaagatgttgaagaaagaatttcaaaaatagatgatagtaaaaaaccaagtggtgtgattttatggaagtatgttgaaggagtaccaatggttgctggtaagggtgtttttggggatttctggctaaagagaattggtgttaaaaacttagcggatgaaacaaaaggctttgccaaagtttctattgaacaattttatcaatgggatccagatatactttatcttgatggccctggtcttcttgatattacaacaaaagatgtatttgaaaattcagtagaaggtatcaatttttcaaatatgaaagctgttaaggataaaaaagtttataacactaagcttggtatgtggaattggtttacaccaaatccagacggaccacttgtactagcttggcttgcaaaatcaacctacccagaggaatttaaagactatgatctaaaagcaatgattaaagattactataaaacatggtatgattatgaattaacaaatgaacaagttgaggatatgtttgatatatgattaaaaaaatctttatcaaagataaaaaaataaaattaagctcatatataatcctcataagtctacccatattaattagtattttggcacttgccataggtaggatgcctcttagtataggacagattattgaattttttaatgcttatctaggaggaggagactttgatcctatgcttgaatcagtaataataaatgtaagattaccaaggattattactggtctagtagtgggagctggtctttccgcagcaggtcttgcctttcaaggggttttttcaaaccccttggcaactcctgatatactaggtgtaagctcggctgcaagtcttggagctgtaattggtatacttttatcactttcaaccctatctattcaattatttgctttagcttttggattaattggtgtagtcttgactttatatattggcaaagctaagactaggtcatcaacgataatgcttatactagcaggtcttgtagtttcgtcattatcaaatgctctagcgtctcttctaaaatatacagcagacccgacagataagttgccagccatcagttattggcttatgggctcttttgcaagatcatcttataaaaatttgatgctttcagcacccctaataattttgggaatcatcataataagactcttgatatttaggctaaatattatgagcctatcagaagatgaagcaaaaagtctcggggttaatgtcaaaaaaaccagacttatttttatatttgcatcaacacttatcacagcttcatctatatcaatgtgtggtcaagtcggatggattggcttgataattcctcacatggcaaggatgatggtaggagccaacaacactcataccctaccttttagcatatctttaggatcaagtcttatggtattaatagaagctttatcaagaacagtttctgtaatagaactaccaatatcagttcttacagcaataataggagctccaatttttataagtttaattagaaaaactgggggtggtttcaattaaattagaaataaaagatgcaggattttattatgataaaaatcatgtattatttaagaatttatctttttgtctggatcaaggtcaggttttatctattttaggacccaatggagttggtaagactagccttataagatgtatatgtgattttgaaaaatggaaactaggaaatagttttatggatggaaaagatatttcaagttttaacagaagagacttatggtctaacatatcctatgttccacaaaaaaggtcattttcttttgaatattctggaattgatatggtagtgttagggctttctagtaaaattggaccatttgcaaaaccaagcgcaagagaatataagaaggcaaataatattatgaaaagtttagctatagagaatcttaaagataagtcgtgttctgtgatgagtgggggagaacttcagatggttctaatagctagagctttaatatcagatccaagtttaatcatattagatgagccagaaagtggtcttgattttaaaaatcaacttaaaataatttcattaatcaaaaaactatccaagatagataatattagtgttattataaatactcattacccagcccatgctcttgaaatagcggataaatgcttgatgttaatggaaaatgctagacataaaataggcaaaacatctgatattatctgtaaggaaaatatgaaagacgcctttggggtagaggttatactcgaaaaaataaaaaaatatgaaaaagaatatgaggctgtaataccaattagaattgtaggagattaaaatgaaaaatattagcaagggaaaaatattgacaccagaagaggtcatacctataaaagaccagcaaaccataagtaagaaatttgtagacttatctgagcttcacatcctacttatgagtctggaccaagataccagcatttcccctgaattttatgaagaagaaagaatatatctcgtcttagaaggagaccttaaatttaataatgaaaaacttaccagccaggacctaatactttttgaaaaagacaagctttttggcataggagcaagggaaaaaagtatatttttagaaatcgctattgacttaaaggaggaagaaatgaaaaacattgacaagggaaagaaaattaaattagttgactatttagattatgtagaaggaggaatcgcaaacattgaccttgtatcaaaagatgggtttaggcttgttttaatggcctttgatgcaggggaggggctaaaaccacacaaggctcctggtgatgctctggtcctagcacttgagggtaaggcaaggcttcttgttggagacaaggaagtggagatagaatctggagaccaaatagtatttccagcaaatgtaactcacaatgtaactgcaattaaaagatttaaaatgttattaatcttatctgtagataaataaaaaagatcttgaatgatttttcaatcataaatctgaaatctaaaaattagaccaataccagagttgaaattaaagcttactctggtatttatttgttataaacatgggtttgtttgcacattagattcttgaaagtatttgaaaatgtaacttgcaagtacaacttttgattttaataaagaaaacaatgtttattaccatgatactggcagaggctatagcccatatgcttatttaggactttataaacaaaagagcttaagattgataggcaaggtgtgtgcaataattgccgctgtagaaaaagatggagaaattgaatatgaggctgaattaggtgatgtaacaaacgaacataaggatactattgttaaagcaatggaagatgctctttcctatggttatgctttaaaaaactacaagcataaatatttcttcgttgataaattttatgaaacagactttagaaaggtgtcaaagagagcaccaatgggagtaaagatatttgatttaaaataaatttaataactaaccctcaaaccccttaaaatacaaggatatttgcaagagtacaagttgaatttactaccaatttactacttttgagggaagagccttgatgtgctgtaaaaactcttgcagatagaaacgttttaccacagataacacaaggtataaagaaagtgcaaaattaaataggaaatcataaaagcggtgatctttcgtttctgttaaaggaaacataggaataccacttttttcatgtccatgttacgaggtagaagtaagcaagggcttgaaatataaggctttcaaagggcgattttgagaaagtaagggtaatatacattttctttcaaaatcgccttttactgcgtaacaaataaaaataaaaggagtatcagtatggcagtttttggaacagaaaaagacaaaactttttagttgcttgaaatctggacatgatggcgaattcttattgaaacatcagcatataaatccacatcaaacccctctgccacttcaaaacttacaaatatacaatatggtatttcatcttttttaagtttaattgcttcctctctacaatttacttttataataagatcatcatcattccagacgattgggttttctccagtaaaaatctcatgttgtaatgaccccttacgaactgcctgccattctgtattttgcctctctggaacaagaccctttccaccatcatcaatattaaaccatagttgtgcacctcgatatgtttgcttatttggtacaacaggagaaagataagctaaggtaacagttagcttccgtttcattaggcgagacgaaaagtctacaggaagcgggagtctaaagatatccccttcatctttctttaatgctccaagtccaataagagttatgcgttctttagtgcactctataacacgacttatattaggaataccgtttccaagccatttacttaatttttttggggaagtttccattgatgaagcaattttatcagcaatagattcccatgatgcaccatgtgtgagcatagccttcaaaaggattgccgtagaatctgctggcatcttggtacctgtttcgtcaagaaatatctgattaagtacatcatggcattttgctgcttcatgtgttatttgtgcggcagcatcgctagttccaaaagaaaaagcacatccatctgtggcgcccgttccatatggagcagcagataagcatcctggctcacgcgaagattctacccaattgattttaccatcaaatcttcctctgacaaattctctaccaccataataaaacaagtccggagtaatgatagaacgatacccttttccaattgcagatataggggatggtagtcccctgtcaacggcccaaataaaacgatcggtttcatttacattagtgaaatcatcatacaaagcaccgattgtaagtccattcaaactttctgcgggtgacaatattttaagattgcgttgattatcttttatgatctcagcaaaaatgttacttctctgtgttatgtcaagagattttagttcgtcgaacggtttatttataaagtttacaatctctgggtggttgccggcacttatgataaacaaaatcttatatttataggcaagaaaatcgagcagtcgcgcggtcgggctcattgtgacagccaactgtcgcacagggtctccaatagacaaattaattactttagtattgggggccgttgcgctctcttgaccctctcccaccatcattctctttacagctcggtgaagaacatcaataaacatattgtcatccggaacaccttctgtaatcttatcgaagccgctttgtttcggtcgtaaaataggtctcacatatacgggactactaataggagcgtcattccttttaatatcaccataaattgcaagggagaccatcgaagtaccatgaacacgatatttgctttcatatcccgtagcatagtcatcaggatcatcaatgataactcgtccacgaagcagacggtgattttgcattggcataccgtcaaaaacggcaaccacagcatcacctgtcggtaatgatgcttcttcagtagaagtgtatacttctgagtccgttgtagaaacaaatgcagattgacaaacaggacggaagaacatgatatcgtcaacttgcgataattcaatttcttcatattgattgactaagctctcaatagaagttcttggtagttcaactaacataccatggtaaaatatttcatctattatacattcctgaattacatgtccttctaacaattgaatttcgcggtgaatcgtttcagctgaattacttctttttgccgcatcacttctaaagaacagttcgatttcaaacggaacgtgagagttcccatcaaattccagcgattcacgccaatattctaaagcgtgtgtttcttcaattctatctcttgcgtcccacttccttaagtcttttattttggtaaaaacatcacggagtcctgcaaatccccgtttgaatacatctgtttctccattttgatatcgttgccacaatgataataattgcgacatcgcctgttgattagacattacacaatatagtttcccgtttagtgaattttcaattttttcaccagatttactgtctacttggtaaaaatcatcatccggatcaaatggtccagtctcgctgtcaagtatccattcaagaccatctgtatttttcactgccgtatagaaattatcaacagttccaattatttcaaaaaccaaagcaaattcagggttaatcccagtgggagattgctgaatttttaatgccttctgttcaaaagcagtttttagtaaagtaaaagatggttgtagccgagtgaactgccttccaaaagacggacttactgtctttgtaaatacgggaggtttgtgttcacgatctgctctttctggagacggaaataatagattctatgtcaaccgttggggagtctagtgaaaactaggctcctttttgttttcctaaaagccatccatcaccgatcttttgaacaaacaaagagtaatttggttcgaaaatgatgaaagttttgcatcccaaaagccacacgcttcacggtcttgatcttgttgtgcgttccttccacgtagccgttactccacgggtaatcaaagatgttggtgatctcctcgaaccagttgttgtaggcgcgcaagcagtaacgccattccttttgcccgcctttctttgcctcttccatccactttgaaagggcggtggcggcggtttctttgtcgttctg

SEQ ID NO: 54 - DNA, 15938 bp, Peptoniphilus rachelemmaiella
  source 1..15938: mol_type = genomic DNA
aatactttccaaaaacgaaagatattgaccaatcagatagctatattgaagcgaaaataaaagagatcaatcgtcgcccgcgtaaatgcttaaactggaaaacgccctatgaagtttaccattcagtagagttgcacttgacttgacaattcaagagacaaaaaaaggaggacttctgcacataggcataaaaagtcctctaaaatgaacgaaacccgttctttccttaattgtatttaattgtttagacgagtgagtatatgaaaagactgacagatataaagtctatagaaaaaagggctatttttattgcgacttattatttgaaataaacatatagactttcccattttattcctccatttatttgccgtttattatcaatcttttacaatccaaatatcatcttgattaacaacacaattcgagcatcccaaacattgactttggcatttacttgttgcagaccttttagtttttaccaaatatccattattttcaagatattcaattttcatttttacactatctaaatcctcacctgtcagttcagcaagttcttgcaaagtgcaagtctttttctttttcaatacttctaatagttgtataagcatacttatcacaccttaaaaaatcagtagtccaatatgatacgccacacaagatataattagagccgataatatataatacagtgctatttttatcgtccatttttttgaatgtgtttcttgtgcggtagctgcaagagccatcaaacaaggcatattgaagaaaaaggcaaaagtaaatgctaaggcttccggctttgaaatcattgtcaacatattattgcttagaatagcggtatctactgtccctttaacctcaactgcatgccatattcctgaagaagtaaataatgatgccattactcctaatgccgattcttttcccattgcagaagcaacaaaagccataaataattgccatggtaacccaaacaattttgttacaggctctataaatgttcctactttataaataaggctgttagctatatttccatcagccgtataggcaagaatccaaaatataacagaaataaggataatgatactcaatgcccttttcagtacatttcccatcctattcattacagaagaaaataaatttttccaatgtggcttgtgatatggtggaagttccataatcattccaaaatgttcacttccctcataaagcgattttctaaaaatcctatatgtgattagcaaatgtagaaaagcaactgcaaataggcttaatatcacaaatactgcctgttttccgaagaatgttcctgtaacaagcccgactactccccatgttgacccgcaagggactacccaagataatgcaatcgtcataaccctctgtccccatgaatcaattactctcgttcctgtgattccacctatattacaaccgaaacttaacaagaacggcataattgcttttccttgcaatcctaatttcgacatagtgttgtcaaagacataggaaactcttgccatatatcctacatcttccaagaatccaaatactaaactaattcccaatacataacttgccatttgcaatgcaaaagtaattgcagtcattacggctccacacaaaagtgaaatcagccaatttgatactccaatggcgacaagcccctttgccaacaatgttgatattttaggtataacaaacccaaataaccccattagcggaaatccgatgagcatagaagcaactaatcctaaaatgataactccgatagccataggttttccgaaagctttacttgtggctatacgatcaaatttgcttctcttaaatactctctttttctgaataacatttgcattgataagtttatctatccaatcgaatttgcaattaccggttatcagattcccatttttgatgcctcttaatatatcctctatttctttaaatttgtattcatcaacattatcttttaccaattcgattactttcacatcttgatcgaataatttcccgacaatccatgattttgaaaatacgcctatcccttcatcaggaatgtaatttttcagcaatttatatttatctccggcggcactttcatatgctctttcaaaattattgtctgctaaaatccttccgctgtctgaacgctccagaaaagcataaaactctttgtattcctttttatctgccgcaacgataggaatgacaggtatattcaaggatttttgtaacccctttatatttatatttttcccttgacttgtagcaacatccatcatgttcatgattaagacaaccggaatatttattccaatgtagtcagagagcataaatagacttcgatttaattgtgaagcatctgccataatagcaattaggtctgcgttcccggtttctatatattctcttgttataacttcttcctctgaatttgctgataatccgtaagttcctggtaaatccacaatcgtataattggtatctttatacgaaaattcgccttcttttttctcaacggttttacccggccaatttccaacatgttgatttgagcctgtcaacccattaaacaaagtcgattttccagaattaggctgccccagcaaagcaatcgttattttcttcatatctcaaagtacctccatcattattttctctgcctctatcttattgacagctatcatcgtatctctacaataaatgagaataggttgctttttataattctggataacttcaacatcgcttccgacagttattccgatagatattattctgctttgaaaatgtgtatcaccaataatttcaacaactttaccttttgtcttttctttcaaagtactaagcctctccataactattctcctttatcatccactttttcgctctttcctgtgtatttaccatttcatagtaatgtcctttttttccatatagttcattatgatttccttgttcttcaattcttccgttatttatcaaaataatttgattagcatttttaatggtattcaatctgtgagcaataacaaaaactgtctttccttgcattaaatgctccaaagcattattgattttagcttcattatcaggatcaagagaagctgtagattcatccaacaaaagaattggtgcatccttcagaatcgctcttgcaatagcaatcctttgtcgttcaccgccggataatgtacttcctccatcttttatttccgtttcatatccatccttcattttcaaaataaattcatggcaacaagctaattttgcagcttgataaacttcttcctttgttgcattaggttttccaaccctgatattgttataaacagtatcggttaacagtacattatcttgaaaaacctgactaacatatttaagcaacacatcaggttttatggattttatattttttccaccaattataatttctccgctgttcacatcccaaaaccttgcaatcaaattggcaattgtggtttttcctccaccggaaggaccgattaaagctgtacaagtcccctcttttgcttcaaaagaaatattgttcagaatcgttttatttctatcataagaaaaatttacattcttaaattgaatatcaaaattttctaattcaacttcattttcagaataaggcaatggcttcgtttcataagctttctcaagattacttgcagctaatttcaaatctttcaatagtccataggaatgttgaaaggcaataagaagtgcagataatgctaaactcataagcataaaagctacaaactgttcagttttaacactaccatctataagcaaatatcctcctataagaagaactatcggaagcaaaaagttaactgtgataaagtacatacttgtaggtaacgccattttcttttctgcgtttacgcttgtctttctaacattttcaagtgtatttatcattctttcaaaatgttcacttgtcatattagctgacttaaacgctttcataccttgaatgtactctaaaataatagaaatcatcttagaatttaaatttctttttcttgccccgtatttttctatcaatttgttgccccatatcaacataggatatgcgataagcaatactaaacactctaataatgcgagcttccaatcgataaaaaatgtgcctaataaaatcaatattgctgtaactgctgttttaataaccgatggcaaggtgtgcgttatgatcagttcaaaactactcaaatcctttgtaagagttgataatagataaccactactatttttttggaaatgaccaaggctcaaactcctataatgatttgctaaatccaaacgcatatctccacacatttcagctcctcttgaaaagctcaaatagtatgcatgcctataaatcagtatccttgcaatcatactgatgaaacatattaccgtatattctatgattaaggttttagttaatgtattctgcaatatactaactacggtaaaatagagcattaaatacaaaacaatgcttcctatcgaatcaataaccattagaaaaatcggtaaatacaatttttcttttttatctttcagaagtgttctaataatcttaagcatttgtacttaccccctctccaaagtaatcttttgtgtatgtattccacatactttcatagaccccttttctttctaaaagagttttatgtgttccaacctctacgacttccccttcatcaaatacaacaatttgatctgcattcttaatagtatgcaaacgatgagcaatcataatgattgttttatttttcaacaagttttgaagtgctaactgtatctgatactcattttctatatctgaataggaagttgcttcatcaaaaataataattggagaatctttgagtattgcccttgcgattgagattctttgttgctgtccacctgacaatttcaccccttgatccccgattcttgtctgatatccattcggtaaactcataataaagtcatgaatttgtgctgcttttgcagcctcaataatcttattttcatctgcatctgttcccatacgaatattctcatagagagtgtcctccaaaagaaatacatcttgaaaaacaaatgatgtaatatccatcaaattatctatttttaattcattgatcggtatgtcgttaattttaattgctccacttgttacatcccagtacctcccaatcaattgtgcagcagttgtcttgcctgcaccggaaggtcccacaaaagcatttattgtattcggttttaaggataaatttatatgttgtaatgctttattttttgtttcttcatcgtcataactgaaagtaacgtctttaaaatctattttcatacactcattcttgtttatgatttttgttccgtctttcaattcatccatatccattattttttttatgttatccaatccgcttccaagctccatagattgcataaagattgttaccatatttaagaacgaaacaaaaaagcacattgtaagcataataaacagtaaataggatgttgctgataaagaatttctcaaaaagaaatatcctccgaacggcaatgtaaataagattgctgaatccaaaaccactaaagttattgataaaggatagcaagaactcatacacatctttttccaacaagtaatatacgcattcaatgagcttctatattgttcaaatttttctgctgttaaatgatacatttttattacaggcatagcctttataaattcgtttgccgaagcatttaaatcagcaatatcttcggatagctccgttgacatatccggataatttttcattagcatcataggaattcctaatcccaaaatcataggaataagcataacaagtgccatcatccaatttaatttcaacatgaaaatgaacataataaccggaacaactgctacctgagctaattccaaagtgctatgagccaaaaaattttcaactctatctacatcatcaaacaacaatgttttaatttctccgggggcatgctcttgaaagaatcccaaattaaattttgaaatatgatttacaactttcagcttaattctgtgtattgtgttaaaagctgctgtatgagataaaatgcccgcaaaggacattagtattgcttgcaaaacagcacttataattcctatacctgcccacattaaaatttctgtatacgaaatgtttttctggaatatcattagtaatatcttataaactacaaaataaggaactaatgataaagccgcagaaatgacagataaaaacattcctaaatgtagcttttttctctcatcttttgctaattggaatacataagatatccctgtcttctttttttccattagttattccatctcctttcctgaccgttagctatatctaactaactacatttattataaagctaattttttataactcaaaatctaaccatgaatttcggcattccttgtaatccctttatttgtaagcttttcatcagtatttctatttacgtttttataaatttgtgatataattaaataaattcgtgatattaaaagaggtaggtggaataaatggaaacaacagttattgattatttaacaaacttagtacatggcgctccttttactcctgttccaactttatcaactgaaaacaaacaactctttcaaatagatccaaattttggcaaaggtacttttcgcatactaaaatttgacagcagtttaattctaattttaattgctgactttactccaaatgaaacacttgaaaaaataactgaagtatctgaaaagtatttagagattagtcaatttgaaacagaaagtagctcatttaaagttggtggaaggaagttaaataatgtagaaaaaggtatctattgctacttaaatacagaaaagaaaacttatacctattgtgaggcaaataagcctgtaaagtttacgaaaataatcctaaccaaagaatactttgatactttcttaaaattaaaatatgatgattttgaatatgaaaaagcaaagattcttaattcttatttgttaaaaactcaaaattctccgcagttgaattttatatttcaacagataagagagtcccaagctgaaggaaagattttgcctttatatttggaaggcaaagttatggaactattatctatcataattacagggttagaagaaaaggaaaaaaatatatccgttgtcttaactaaaaaagataagcaaaatctgaaaagggctgtatcggctatgaaaaaagatttatcggttcatattgacggacttgaactctctaaaattgctttaatgagtcctgcacgatttcaattagcttttcgcaaatactacggtgttcctccctacgagtacttaaaagaattaaggcttaataaggcattattattgctgaaaaatcctgagtataaaatatctacgatagcagaaaaagttggctatacacacacaggacattttgctaaaatattcaaatcaacttatggaatcacaccaagtaaatatagaagtacgattacataacctaatattagaattcagtgtgtgcttaacgcttgctatctaatttattcttttgagcaagcacagtaagtgtacggacacttacggaaaaattgacgaagcagcccttggggatctgcttctttttttatcaaattttagcttgttagggagaactctaagaccccgaaatacattcaaaggaggaactaactatggcaaatagaataagaaacgaaagacttgaaattaaactaactgaagaagaaaaggctctttttgaacttgaatttacaatctaagtgcaacaaaaaatgattcaccgttttctggtaaaattatgtcgacgaaaaccaatcaaccaggaggaacgatgaatcattattctcattttacactaaaagagcgtgagttgctaaagcattatatggatattggcctaaatcaatctgaagtcgcaacaaagttagggcgcagcaaatcgtcaattagccgtgagttaaagagaaactctgtagaaggaagttatttaccttatgacgcacaggcactttatgccaccggaagaaaagcttgtcgccctcataagaagttggacgataccgtccttttccaaaagataaagtcgttattcttagagcatcagtggtcgctggaacagatcgctgcccgtttaaaatacgaagagagtgtttatagcattagcttctccacgatttatcgagccatttattccggcctttttgacgagccgaatctctctaggggcaatagaggatgcattaggaaactaagacatcgcggaaaaacaagacacacgaaatcctatgaagaaagacgcggtaaaattccaatcaccaatcccatatccgatcgaccggaggcagctgaaaaaagagagcgcttaggtgactgggaagcggatacggtggcaggtaaaaccggcagggcatgcctactcacattgaccgacagaaaaagtcgctacctactttgttagaaaattccaaagaagaacgctcaatgtgttaagcaagccatgattgaactgttgaaggatgaaccccttcaaagcattactcctgatagagggaaagaattctcaaagcatcctgaagtctcccaacaactgtctctagttgagttctatttcccactgccccatcatccatggcaacgagggaccaacgaaaatacaaatggtctattaagagaatactttccaaaaacgaaagatattgaccaatcagatagctatattgaagcgaaaataaaagagatcaatcgtcgcccgcgtaaatgattaaactggaaaacgccctatgaagtttaccattcagtagagttgcacttgacttgacaattcaagcgcaaaaaaagcacctgcctctgcagatgcttcactcttcgccgacggcttttgcatcgtagcccatgtagttgatcaaaaacaaaatccccgccagagccagtgccgtcccgaggcccgtgtagaaaaaggcgataaagccgtcgggcatgagattcagtacgcgaatggtgatgccgaaagtcatcatacaccccataatcaggaaggattttttatcgaagaaattccacggccgcttgtactcttcttcgtagccgtgaatgcggaacacgtgcttttccaccaacggatgaaagactttcgtccaaaacaagataaatatgacggcagacaggcccagatttaaatggctgaaggcgtgggcgtacgcttgaaggccgatttttaatacattccccccggccaaggaccaaatcacgccggccagtaataataaggttctcttttttaccacgatgtcatctccttatgcttgcgccgatggcgcggcctctgtttctgaatcagtttctaactcagtgacacattgtcactttcattatacccttttttgaaagaaaatcgtggctttttaaaattattttatacaaaaacgcctcctgaagcaggaggcgcttgtttcattccgcagagcaaatgcccacggattttttctgttacatggcgtcgaagagatccaccatttccaacacgctcatggcggtgtcgtagcccttgttgccgctcttggtgccggcccgttcgatggcctgttcgatgttttccgtggtgacgatgccgaaaccgacgggaaggccggtgtccaaggtgatctttgcaatgcccttggagacttcgttgcagacgtagtcgtagtgggtggtggcgccgcgaatcacggcaccgaggcaaatgacgccgtcgtagttgccggactcggcaagcttttgcgccgccaagggaatttcaaatgcccccggcaccttgacgagggtaatgtcctcgtcttttacttcgtggcgcagcaagcagtccagggcgccgtccaccaatttcgaggtgataaagtcgttaaaacggctgacgacaatggcaaatttacgatccttacccgtcagcatgccttcaataatgttcattgttttgcctccttgtgtccatgttcatggcaattgcaaccgaattcgtgcaagtagtggttcattttctttgctttggtttccaaatagaagtggtcgttttcgtgggattttatttcaatgggtacgcgttccacaatttccaatccgtattgttccaggtggtacaccttgtcgggattgttggttaaaagacgcatcttcgtcacgccgagatcttttaaaatttgcgcgccgatgtaatattccctggcatcttccgggaagcctaaagccacattggcttccaccgtgtccatgccttgatcttgaagggcgtaggctttgagcttattcaaaagaccgatgcctcttccctcttgacgcatgtaaagcacgatgccgttgccttcttcctccacttgcatcatggcacgttgcaattgatcgccgcaatcgcagcgcatagaaccgaaggcatcgccggttaaacactcggagtgaacgcgggttaaaatggcgtcctcttttgtaatgtcgcctttgatcagggccacgtggtgttcgccgtttaaggtgtttttgtagcccacggctttaaaatgaccgtacttcgttggcatgtccgcttcggctacccgttcgataaggcggtcgtgggtctttctgtattcttttaataactcgatattaatgagggggacgtttaattcctttgccagttcgcagatgcggtcccgctgcatcatttccccgttatcctccatgatttcacagcaaagacccacctccgttaaaccggcgaggcgcaataaatccacggtgccttccgtgtggccttcacgctccaataccccgccgggcttggcgataagaggaaacatatggcccgggcggcggaagtcttcagctttcgaattgggatcggcggccatgcgggcggttatagccctctccacggcactgatccccgtggtggtgtccacgtggtcgatggtgacggtaaaagccgtttcgtgattgtccgtatttttataaaccatgggctttaagttcaggcgatccgcctctttttggctcatgggcatacagatcaggcctttggcgtaggtagccatggcatttaattgctccgtagtgcaggtttcggcggcgacgatcatgtccccttcgttttcacggtcttccgcatccacggtaatgatcatcttgccggctttcagcgcgtcgattgcttcttcaattgtgttccacataatttcctcctaaaatccatgctttcttaaaaaattcatatccagcggggaagcttcttccgccacttcactttgtctcaataaatacttgcccacaatgtcgaattccacggtgatgggatcgccgggctttaatgtgcctaaattggtggcgcgcaaggtttccggaatcagggacacggaaaaatcatgtcgcccggcccgcgccagggtcaagcttacaccgtttaaagtgaccgagccttgggccacaaaataaggcgcccaagtgggttccacggcgatgtgaaggagatagcccccttccttaggctcgatgccctgaacctttcccaccgtgtccacgtggccctggacgatgtgtccgcccatgcggctcgtggggagcagggcccgctccaaattcacggcactgccaggcgtcagtcgatccagtgcggattttttcgccgtcaccgtcatcatgtccgccgtaaaggtgttctccgccatggaagtcactgtgaggcagacgccgttggtggcgatggaatcgccgattttcgtatcttcaaggaccctttcggccttgacccgcagcacgattttctcgccccgcttctccagagcggccacggtgcccacttcttctacgattcccgtaaacatcctctgacccctcctacaaacaggtccggccccagcatcttcacctcatcaaagacgaaatctcgccgttcagtaagggaagcgatggcccggcccgccacaacctcttttccgccgccgaacaaagtaggcgccagatagagggcaaattcatccactaaatcctcgtcgatgaggctgccgtggaggcgtccgcccccttccacgagaatgcgacccatgtccttggcgtacaagtcttttaaaatggcgggaagatccagcttgcccttcttctccttcaccacttccacgacgacgccacgatctttcagggctttgatcttcgcctcctccatgtgtaccgtatagacaatggtgggctgggtgccgtcgtaaacgtgataatccaaatccacggcgccgcggcggtccaaaatgatccgcgtaggatcgccgcctacgccgcttcgattggaaaggcggggattgtctttgatcaccgtgttggtgcccacgagaatcccgtctaccacgccgcgaagcttgtggctgtcgtctctcgccgcctcggaggtgatccattggctttcccccgtgtccgtggcgatttttccgtcaactgtggcagcaaatttacaaattacataaggcgtttgggtcatgatgctggtgaaaaaagcgcggttcagcctttggcaggccccttccaagacgccgacatccacctgaatccccgctgcctttaaggcgccgacgccgcggcccgccacctttggattaggatccaaagtgccgaccaccacccgtgcgatgccggccttttcaatggccacgacacagggcggcgtcttgccgtagtgggaacagggctccagggtcacgtacatggtgccgcccttcggcgactcctccacctgcttcagacaatccacctcggcgtgatccaagccgaagccgtggtggtagccctcggcgataatgcgcccgtcttttaccaagaccgcgccgaccatgggattggtcttcgttttgcccaatccctttttcgcaagagccaatgcccgattcatatactgctcatccataaagcctcctgcataaaaaaaaccgaagcacaatgcttcggagtgacaaccaaatgaaagacaacaaaagttgccttcgcttcttctttcatccggactataccgtcggtatcggaattgcaccgattcaatcaaaatgactcgtggactttaccaccggtgaggaattgcacctcgccccgaagaatatatgaagttcaggaaatgttttcctttcattatgataccacttatagcttaccctgtaaagagattttgtcgccacacggttaaaattttctcccccactcggtacaataaataaaacgagaaaattttgtaataaagaacaccttcccgcgtatatacaagtgaaaggacaaggaggtgaagccaatggataaaaccaccgacatgccgacggtcatggacgatgcaattacatttgaagccgtctacgatcgctacttcgatcccgtgtttcggttcgtcacctaccgcaccggaaatcgggaggtggccaaggatctcacggcggatatttttctcaaggtctacaaaaaattttccgcctacgatccgaaaaaaggcagcttcgaggtatggctctataccatcgccggcaatcaagtgaaagactactaccgcaaaaaaaatcgctttcaatgggtgcccttaattgcggcaaaggatgtggccgaggcggatccggccgccgatgaattaatggaaaacaaagaagaactcgcctatctgcgccgggccgtgaaaaaattgaagccgagagaccaattgttaatcagctacaaattcggcgcggagctttccaaccaaaccatcgccgagcttatggacacgaacgccaatcacgtgggcgtcatgatccaccgtttgctgaatcagttgcgaaaagaaatggaggcctattatgaatgaaaataaaaacccccacgatgacgtaagccaaaatctaaaaaatctctacaccgccgacgaaaaagacaaacaggaggtctatgcaaaaatgaaaaacaaacaacgaaaacaatataaaaagcccgccattgccgcggcctgcgcccttttaatcgccaccctcccctttacgagcttcggcggcggcatcgtgaacacggtgaaacaagtcgtgagcccctcgggccgcatcgtcatcaacgaagacgagccggccgtggccatccccttccccgaggaattaaagggaaaggtcttcgacaaagagggaaatgaaatcaccgacttcgaagtcctgaaaaaggcagagcacgtctactccaaagacggccgggaaatcgtgggaagcaattacgacgaagccacccgcaccggcgaagtcacctttgagtacgccgacgaagtgaaaaaagatacgggcgacaaggccccggtggaagaaatcgccaaaaaattaaacttcaatcccctggtcttttcggataaatacaattacgtggaatcggaaatcttcgccgagccggggacactttccgattacgtcgccttcacctacgaaaaagacggcaagaccatctatattaacgaacggatctcgtctcccgaaaccgcctatgaaaccggcggcgaaggcaagatctacgaagtcaatgtggacggcgtgaaagtcatcattcaaggccgtgatgccgacttcgaacgagacggcctcctcgtctccatctccgccgaaggcgcggacaaagacgatctcatcgccatggtaaaagacttgcatctgttaaaataaattgaccgccggatgatcccggcggtttctttatggcaattttagggaataacaattagtccaaaaaaccgcgcaaaatttccccgtaagtcctcggcgcttcgaagagcaattggccgtggcccatgccctcaaaaaccttcgattccatgtgaggcaagtaagttcgcagcaatgcttcgctcttttttgccacgggctccccgctgccccgcaaacacaacacaggatttgaaaatcggcgaagtccttccggaatctcgtaacgatacaaatcccggcacgcattttttacgctgcggctcgttacgccgggataaaccatggatcggatgctgtcgtttcccttgcccgtcaagggcgccatggcccattttggaatccattttcccttttggattcgctcaactcccgtggtgaaagcccaagtgagaggcgccgcgtacatgcccatgggataggcgaccacgccgtctaaaaaaaggcgctcggcattcaacctgccgcggcccacgagctccaccgccatggttgcccccatggaaaagccgcaaagcccgtaaaccgccccattcatttcatgtagaacaaaatcctcgatggcatccacactggtcttgaaagacgaaaaatcctccggcacatcctcgctgtgcccctccaactcccataagatcacgtagtaatcccgtaaataggcgaggagcggctcaaaacacaacgtcgccgacgacgccagcccgtgaataaacaaaagcgacttcctcgccttgtcgccgtaactcaggtaatgcataaatcccttctttcgtcgtcatcgccttttgtccttcattcaagacatatataccgcagctgatgggagaaaaactttttggcaacaataaacatcccccggcgtagccgggggttttcctttttcggcccaaagggcctgcattactagctgcgcctgaagggcgtcggtggtctgcccgtgctaacgttactcgactaccccttaaaggggttcgccgtgtcaaaggttagttgctcacttatttgatcctctttcaactggttttgtatatactcttgaatctttttagcattttttcccgctgtatcgacgtaatagcctcggcaccaaaactgccttcccctatatttaaatttcatgtctccccatcgttcatagatcatgatactgctcttaccttttagaaagcccatgaatg

SEQ ID NO: 55 - DNA, 14127 bp, Peptoniphilus rachelemmaiella
  source 1..14127: mol_type = genomic DNA
tttcggagcaaacacgacgtgatacttacaattccattttgtgtgtgataaactatgggtgtgatttagtgatgtcattatttcctcctgattgtgattggttggcagacctctctcatcatatcacgctggaaataacgggcaattatcgctaaagctaaacggaacccccggtctaaccgggggttttctaatgcaaaaaaatcgacacaatcccttgtgccgattccctttaagcttcgattactttcagtcccgatgccgccgcccatatgaatgccgcagtaaggaatatgtgtcccacgccggagacggccaccatgccgatgcgggcgacatcaccgacggtgtagctgtcgatcatgccgtgcaaaaacatggcgctgaaagaaaagaacatgccgaaattataaatggtgaggatttttttcagacggacgttttcataagcgcggtcccgaagaagcaaataggctaatgtcaaaagaacaaagcctaacacgattaagtggacgtggaggaatgccattttcgaaaccaccgggtagatctttccgatttcccggtaaaaggccccggcaaatacgccgaaaaataaataggccagggcaaattgcagcagatcatttttgtcaaactcgccttttaaattgccgtaaagcgtccaaacgatgaggacatacatcaccgtcttcggcatcattaacatgccgatggtgggcatggtttctttaaataaaacaaccggcacgtagaagaggaaactaaagaatacatagaggtatagcttcccgaagtttgtattatatcgttttttgtatagcagcacgatatccaccaggcccatgatcacaaagggaatatttgaaatcaaatccatggtttgggcgtggttaaacgataaaatcactgtcccgatccgaataagaaatagccccggcatgagaacatccaaagtgcgattcgatgctttcatctcccgccgaatgtaatagtaaaacaggagataaaacaaagacatggtcatggccgagacgcgggtgccgaagaaaagatctgcggcgtggagttcaaatccgttggcctgtgcattggcaataatccttggaatcaaatggaaagcatcgccaaggcccaggagcatggccatggcccccacgaggccgctattttcctttcgcagaagcaacatacggatgcctagaaaaatgacaaagattaaatacatgctgtcgaaaaacagctcaaattctttcatcgccgatccctcccaacaaatactcgatgtattgtttcgacgcttctctaaattcttctttcgtgtagtcctcgatcatgctgtccttgattaactcgtgaaaaactgccatcatatataaaattatatgggcttcgctcttgccgtaatgcttttttacaaaatccttcccatgagaaaggctgctcttttcaaaggcaagaaactgcgggcggtacagatttcttaaattgtgatcgtaaagggcttccagcaaatagtcctgatacgcccatagggtagcctccggatcgtgatggttcttttcaagcaaatcaaaaaacacatgatgcacctgccccgtggcttccttcaacacggtgaaataacaatcgtctaaatcgtcgaaatattggtaaaacgaaccgcgggcaatgcccaaggtttttacaatagccgttacattaatggattcaaccggcgtttcttcaaagaattttcgcaattctttctgtagccgttcttttttagatggttctaaattttcaaatgtcgctcttgccataattcctccttaatgacactctgtcacttcttaaatgatacgctattgacccctctttgtcaacgtcgcttctccaaataaaaaaatgcctcgatacccatcgaagcattttagaaaaactgaaactacacgtccaaatccaaatcatcgacatcgcctgcgtcgtaactgtcccaataactgtcgtaatcgtcgtaaacctcttcctcgtcgccctcgccgtcgtagtcttcaccatagaagacatcctgttctttaaaggacgcatcgccgaaatttttgtgcgtgaagatgctccgatccggcgcctcctcccggcggcgttcctcttcttcgatgatccaatggacgagccaccattcaaaatattcctcttcgatgaggcgcgcctcttcctcttctgctctttcgaaacgaagatccgtcgccggttcagaaggcccatgagatttagattcccccctcgcatccttcaccaatctctccagggcgtcaaacttgacgccgaaattcgctcttttcaaggaatctccagaggcaaatagcggggactccaccttttccagcaaaaaatccgccaaagtgtccagaatctttcctaagacttccaaattccataaggacccgtcctcgttataaacggcccccttatccatgagcacttctaaatctaaaatagctttaaattgacggtcttgaatcaaatagggatcggtaatggccaggcgcgccaaaaagccggcgacctcttcgctgatattgccggcgatgatggtgtcgtaaacggtcttataaaaggtccgtgccgattcaattacctcatcgaggtcctcttcctcatcctcaaggcccaatgaatgaatcatccgctctctgtccaatggatttgatgtcgggcgttgaatgaaatgagcctctttttctatgggattcgaagtgcgtttaacattataagaaataatcattgcgccaaatgccacgaccagaaatacaacaaacaatacgtatgggtccatcccatcacccctttatcgagaagaaatacatcctcatgcaaaaaaatagatccgttgtcaaacgtgctacgatgcaaaatcattagagtaaaatccattattctatgaatgcaataaaaaagcaagcttacataagtaaacttgctttggcgtaccgcaaaggattcgaaccctaacgcacttaagattcaatctttgaagcctcatcaactctcgtttgatcatgtggcccgtcgccattaacttgtatttatttatatctgaattcattttgaaccttaacttaagataccataagctaattctaattacaacacttcttcctcgtattccttcataatcttatagaaggtgttccgctttagccctaccagttccataaaccttgtagcggtaatttccttctctttccactttggatagtttgcttctataatctctctttgttgatctgttaacgttgagtagttcatcttcggtctacccaactctacccctttcgctttggcaaggtcgattccttccctttggcgttgccttatcttcaatcgttcttcttcggcaatagcacctaatacttctattagaatgttatttaccatttccataacccattgagaagattgttcgccttctaaatctaccagcgttgttggaatgttaagtatctttacccttatgccttgctctttgaagtgttccagttcccttttgatttcttccttgttacgtcccaagcggtcaagttccttcacaataagcgtatcacccgagcgtagcatggtgttccgaagtgcagaatagttttctcgcttgaagtcttttccgcttgctttgtcaacaatcatatggcgttcgtcaatggaaattcctttttgattgcaataatcataaatcgcttttacttgcctatctgcattttgttctttcgtcgacactctcgcataaccgtaagtataactatctgccataatagaacccccttttgatttggtgattctattttagccgaagtgtttttaaatatccagtcttttttataaacatttgtaaattatttttgctatgcttataaacactatttccgtttgtttcgccttgtttgtttttgtgtacttttataaacagatatttttaagtggtcatgaatagaaatcttccgtttgttcccttctctatgtatcgccggtaaaccattagcaccgaaaaaagatggatcactttccattctgttttgaatctatgattcatgaatcaatctgttcgttctaaatcattagcaacaagaaaatgataggcggggaaggctatacactctctgttcatacgctttatgatttgtcgtagtatattatcccctactttcatatctgattcataccgttagcacctcaacaaattagaaggggggtagttaactaatctttgaaaagttttatcggttgctaatatgccccctaaccccttccataaaattggcgaagaaaaaagaaccaattcagatgtatctgtatttcagcatgggtacaaaaaagaccacctattttttaggtagtccataagttgactgaaattttatatagtcctcaaccttaccatcttttagtttatggtaaattgtgctgtaattcagattgttttccttgacgtaatccattagcggaatatagtcccctaaaagtacgccggtttcgtcattctccaattccacgccttgccaactgatccccctttcattacattcacttttcacccacgatacgggtatagcaagggaatttccgaaacgtatcgtttttttaatcttcccttcattgatccaccttgttatttgtggagttgatttcgggctaattcctatgattatgcacgcctcagttggcgttacataatccacaactctattcttcataatatcacccctatgtatcattacataggattatatcatatattccccctttcatcattttatgtattttaaaaggctacccgttaagatagccttttaattattcttttacaatttctgtaaagtctgaccaatcttcaactttaaatgctcgtatatcccgaacactttccttgaaccagttgattttagataatctgttaatcgcacggtaaacgtgcgttaaattatctctacttgaatggctaatatagaggtttcccatcgcccactcaaagccaacctctttcagttcttgtcctatttcgtcataggctctattgtatggatctccataacatttttttaaaacatctatttctaaatcaaaaactatgccatacattcacttaatcccctacaaattcatcaacagattcacggaacgtttcctcaagttcacttatcgtttcgccaccatagcagacgatggaatcaattccttgtatctcaccgaaaaacatttcatcttcttcgctgtactcaatactaccgatgtagtccttgtatttcattagtttcattgaatcctctttgccgtctagtcgttccactaattcaggctctatgtccatcgcttcacaagcttcaaaataggcttcgactgctcccttaaaatcttcaatcatttcttcgattgtatctccgtaaaatgcaaatgcaccatcaacaagcagatatccagaaatcttcccttgtactcttttttcctttacaactccagcaatacctttgtgttgtaatactttcataaaattacacctaagcctatacacttgattcagaataatctaaataacactcacaagcttccttgaaatcttgaatcgcttcctcttccgtatctccaaaaaaagaaaaatatccttcaacacctaaaatctcaccgataaaaacattatctctaggatcaaaatcatacgaacctaaaaggtttttatattttagtagcttcataaaatcccctattcgctaagcacattattattttcttgttcgcaattctctaaataaaattcaactacttccttgaaatcttgaatcagttctttttctgtttttccataaaaacaagcaacgccgtttattagcaaatgaccgcaataatcgccttcgattttttcgtcttcaactacgccaacaattcccttgtgcataatctttctcataaaatcaccataattctttgttaaatcattcggtcatttctatacttttattaaattcttcaatatatgtttcaataccttccttaaatgattcttctaactcctctttcgttttaccacaaaaatctatcacgggttcaattccgaggataattccatagaattcttgcttatcttcataaaattggtattcgcctttaaagttcctataccttatgtagttaaccatattatgcctccagcaaagcctaaatctactgttccttaaaatctcaacacgattattcttataccgatacctaactaactacgcttccttcagtttaacatcatttttaagtttagcacaaataaaaatggattttcgaagttaagcaatcaaaaaaaggtttatggttaagcagtttataaacagagcgagaacatacgttctagctgttcacttcatattcaatgcctatcaatcatagactaatcttttaagcattcactttctctatgttatatttttatcaaatgtattcactatttctttttttgtgttacctaacctatacgcctacttcatgccatttgtttgacttgatcttttaaagtttagcaataataattgttaatagcctatcaagtgaataggttctctatatatggctaagaataacctctcttaatatgctattaaaaaagataggactttttagatcctatctttggtacttctcttatatttagttttaactcttagtagtcattttcagaaaattcccaaggctctaacttatactcttttgaggcaacatcataaactacatcgacttttcttccatttgctttcttataggtgtatttgattgttgtaaaatcaacaccatctctaacacttgttcctgtgtttgtaatcaattggcctttcattgttggtgatggttctccgggttctacaactctatcgcatttcatataagattctatcccttgttcgttaatcaatgttagttgataccgtaagattggacaatctgatttatttaagaacctaatatatatccaacttgataaatcacgatcaagatgagcattaaagttatctaaatcaattggtatatctggtactttaacctccggttgtccttgttgtcttaaatgaaataaatccgcaatagaaaaactgactgacgattgctcgctagtgtttgcataattatccgcaccagtatcagtgcctgtaaaagcataaagcatactaaacactaaccaagtgacaataaggcggttataccactttctaattctggacggcttcttggcttgaaattcagaatcaattttgtgagaacctaaattcaaatcgtattcgacgtatacattcgaattattctctgctaaatatgtaaacttgattttataaatttcaatatcatccggcgaattttctatcttattttgaaccgctttatttggcaatacaattgaattgatgcaatatccaacgcctttcttcaggctttgtgatatcccctctacgcaaaaatcaacgatagggtaagaagatttgttttgaaaatacaatacccgcttatcttcatcatctttatcagacaaggtatagactagctgatctatggttacatctgaagtgcttttgatacccgaattggcttttagtctcttacgctctccaaagaacatcaccagcatacagacaaatccaacaagcccattaaatactataccatcactgcttatgccttttgtgatgaagctatacatgaaccaaaccgcaccaatgatgcttatataaaaaaactttttctctttgaatgaattggtactcgctatttttccaagtttcatcttctcctccagtcaccactttatttccactttatctattttatcacatacataattatatatccaaatacattattaaatctctagcaagttgaaccatcacaacttaggaagcccaaagccggaagaacccgccaggatataagaacgaatccatcattcttcttgtcttaacagctctatgatgaacctaaccttatcagattaagacggcgactaggggcttttctgccccctatcgccttaatctaatttaaaatcagtttgcggaaaatggtgttcattcggtggcatgcgtatatataaggcgaaaaccaccaaacatacaccatagttaacggtttatcaatcttttacgattctgtatgtctttttatctctagtatttttttctctagaaattcttgactctatcctataaccgtattctgctaaatgattgttgatagtcttaacggttttcgaaacagtaccgttcttatttttaaaattcaagtccttcgccaacatatcaaattcattttttagcaattccctgtttccatatttagcgaagcatttctgaattctttgtgctaatagttttcgtgtttcttctctctcctgatctttcagtgcttcttgaattcgcttttcattttcgattcgatcattttcttttttgtattcttcctctactttatccaagccctttactggcggaagaagaacagaattatctgaatgggttagcagtgtataaatgtgtccgaagtgatagttaaatatattctcaccatctaagctatcaaattctaacaattcttcataggcttttttcgtgtatctacactgttcgattctaaacagattcggctcggaatcttcgccgctattattttgcttagcttcttcgctatttattgtcctttgtgaatctctgattttatttttaatgtctcctaattccggcacaatgaatgtaatctctaatttctctttatcgtttctgttttttgtacgtattcgcccgatcatctgaaccaccgaatcgtaattcacataatctatgattacacgcttcacctgcctatcacgaatgttaatgccgttatctaatactttggtcgtaactagcacatctttattgaatttttcattatctacaatgcgttccctttcttcatggtcaacaaatctactgaacccgtctgtatcatagaggctacatagaaaggcaccccctttgtatttcttatctaataaggatttaccatctgccattcccttgacaatcaaggcatatcgtttattgttggagaagtatatcatcttattgtatggattgcttaactttacttgttcgctaatgaatttatctttatccttttcatgaatgtagttaaatataaagtgattgtttacgtgttgaatgatattatcatcttcttccggtatggtcatatattcactgtcgcaattatctattaagtcttgaatacccggtgtcaattgtcttagcaaatcaacttccttcattctctcaaaatgttcaatcttgttttttgcttcatacgctcttacagcgttaataaacgcctcaggtgtagcggtcataaacacttttatcccgttacaatggttaaaaaggtattcgaattctttttcggtattgtcgttgaattcagaatcacttgtaaaatagtgggcttcatctaaaatcagatagtctacttctctaatatctcgctctacgaattcttccgttcttcggaaatactcatcaactaattgttgtgataaacccgtacgcttcctgaagttatttttaaattttcgtcttttctctttatcggtttcaaataaaatattcccaattatttgatagcaatatgtcaatgtgttgtcaataatatctcggtcattacttccatttttatttttttgtgcttgcgtacgtttcacgtattttttgttttggtcttttagcaatgaacggttcgaaagaatggctaccttttttcccgtacccaataagtagtcatacacgaaactagttttgccgctttctaatggggcactaaccaggatatttttatatcccatttcgtttagggaatttactctgttaaatagccgcttgccatcaacaaaaaggcgatcatctgattgtctcgtgtttcttctactcatattccccgctccgttataaaggttaaatgtaatgccgttctttaatagtgaaatagggaagggatttccttccctgaatattcaccattatatcaaaatctcaatcggctttaaatctcctcgtatcgtctcgcaatcgtatttgaacctaattcttttcgccggttcatgtccttaacactggcataaaagtaataggcactatccactaaggtttgaatattgaatcgccaatctttttttatgtctcgcttatggttcggtttcttgcccatacgatgaaggcaaggcgtgaaatgaaattctatgtcgcttttagtatcatctaagtaaatggtagcgatggctatatctgttttcttgcttttgcttttcttataaatcactacacgattcccgttattttcagtctttatgtccagcccgattcggttcatctgatcgtatagttttaagtactgatccacaaatacattcacatattcaaaatcaattccgctattcattttctcttgttccttatctatttttattgctccttttgattatctacaagttttttagcgttaaggtaataggtggctatgcttctataaagtgtttccacatcatcttgtaccgttcgatttttaaatttcttcggtttcgcttcggcgtatcgttttctgtacgccacataggaatcaatattgaagcacatcggatagtatttttcacttgctaaatagataagaacgaccgctttatttttgttcatttccttatcgaagtagtaaataacgacttttcttcctctatcttctaccttgcttcgaagccctatacggttcatgttttccattagtgctttatagctttttacgttttgaattggcaatattctttctctcctaacttcattgttcttattcatgtctattcaaggctctaggttctaatttaaggcgttttaaattcttattgatagttacacttgcctaaaaatagaaaaaggctattgctgtttagcacaatagccttatgaatttgttatggttcattgaaaaaagaaattgaatgtgaatgatgttcattgcctaagcagtttattctctgctttatgttatcgtctatccggcttgccttgtagtggaacaatatgtaggcttcgcctttatgaatcagttgggttgcttatggctcgcacgattttttaagtaactttagtaacatcaccttcctaatttgatctatttttgtgaacatcactatctcttattctcttttcacttatattatacccatttaggcaagcgttaacaacctttcttcaaatttttatcctctataacccgcatgattaagccatttatatttgtaatagaagcgtaatataagaatattgattcgttttttgtacttgttttcccacttttcccgctcgctatcatgatctaaaataaaaaccctaacataagcgttagggctcttcatcaatagtccgttaggaaatcttctaaatctatatcctcgtaatcaaagaacagttccacatcttcacaatcaattggcggatcatattcggcttcttgattcgtaagaacaaaagtaaatactaagtttgcgaattggtgaacgggtatatgccaatcttgtttccgctcgccgtctgtattgacttgtgaatagtaataatcccgaaggttatcaatgttgaattgtacttgtgccggtgaacccgacgacgtatcaatctctgctaaaatacttacatctccaccttcgctaacggtaatggtgtcctcttcgaaggttgtttcacagccgcaaaattccatacattcttcaaattctctataattcattccaattcctacctttcatgcttctttttttgttacttcttcttatttgaggctctcacgtccattttaaggcgttttaatcttttatagatggaattatattcctatttatctataacgccttatatttgattgtgtagccttatatagtgatattatccttatttctaattctaaagcgttgattatctgtattcttctttcgtataagcccttttataggcgaagcggtcttgtgcgaacgtaacaggtcattttcatcaatctgaatatacttttttgtcgtgtttagattgctatgccccatgaccttttgaagataaagaagattcccttcatggcgaaggtattctgttccgaagaagtggcgtagttgataaggtgttacctttacgcctgctaattttgaataacgcttcatgttatttcttaggacgtgggtttccatttcttcgccgtcttccgttaagaatagatggtctttgttctcccattgacttaagacgatttcccgaagattgacaaggctgttcttcacttcatcggatataggcgtaatcctatctttcttcgtttttgtgatgtcttttgtgaggaagatatatcccttctgcaagtctacatgactcaccttaaggcgtaccacttcggctggtcttatgccggtatctgccattagcagaatcattgtcctatctcgcttacctacataactgtatgaaggtataaccgctaacaaggcttccagttcttcaatacaggtaggcttcggctggtcaacttcttttcgtcttgtgatctttaattccttgattggatttgctttcagtatctcttcttcaataagaaaattaaaatagcaattcaaatgtgcccgttggttattgaacgccatatcagaataccagttgatcttatagaagaagtctgctgtttgctctaggagattgtcataatccataggcttttcagtttggtgttcaaagttcatgaatattttgcgatagctttctaaggtaatttctttaatgccattcacttttttagacaacaaaaaacgcatctgcaacgtgtctagtttaaattgacttttcttcatatcaccctcttttcatactccaatagttagaggttaaaagaattcggatataaagtaagttatttaaaatctaaacacgcaacaaatgcgtatttttgctaagcttacataagtaaacttgctttggcgtaccgcaaaggattcgaaccctcgaccttctggtccgtagccagacgctctatccagctgagctagcggtacaaatggagcggaagacgagattcgaactcgcgaccctcgccttggcaaggcgatgctctaccactgagccacttccgcatatggtggaggagagtggattcgaaccactgaaagctgagctaacggatttacagtccgtcccctttggccaactcgggaactcctccatatgtaattgcatccattttagaaaaaatggcgacctggatcggactcgaaccgacgacctccagcgtgacaggctggcattctaaccaactgaactaccaggccaggttggtgggcgcaatagggctcgaacctatgaccccctgcttgtaaggcaggtgctctcccaactgagctatgcgcccttatatggtgaccccgccgggattcgaacccgggtaaccgccgtgaaagggcggtgtcttaaccgcttgaccacggggccatttggtagcggtgaacagatttgaactgctgacactacgggtatgaaccgtatgctctagccaactgagctacaccgccataatttggttcttcgcgtaaaaccaacgcgaatcgcctcaaaaaaataatggtagcgggagcaggatttgaacctacgaccttcgggttatgagcccgacgagctaccagactgctccatcccgcgatacatattgctgatggacacatgatccatggtggtgccgaggaccggaatcgaaccggtacgatctcaacgaccgcaggattttaagtcctgtgcgtctgccagttccgccaccccggcttatggctctcagggtgggactcgaacccacaacctaccggttaacagccggttgctccaccattgagctacctaagactattaatttaattggattcatcagtaatataattcagaagaaaaatcttctgcccggcaatttcctactctcccaggtcgttaccaaccaagtaccatcggcgttaagaggcttaacttctgtgttcggcatgggtacaggtgtgtccctcttgctatcgtcaccggacgaaccaagtgc

SEQ ID NO: 56 - DNA, 14100 bp, Peptoniphilus rachelemmaiella
  source 1..14100: mol_type = genomic DNA
ccagaaaaggcaattgctacgacaacgcacccatggaaaacttcttcagcgtactgaaaagagaaatctatgccggccacgtctaccaaagccggcaagaactcgttcgggccattgaaaattttattcgctattacaacaacgatcgaatcaaagaaaagttaggaggtctgagtccgaaagagtaccgtgaacgcatgcaatccgcatagaacgaatgttatgtaaaacaaaatcgagtaagcgaaatgcttactcgattaagtccaactttatggggtcactctaatcatggacagagatttttttttcatatgttgtacattcctcgtaatcatcatatatctcgtgaaggtgtccggaccatgtgttttagtcgctcgtcgagcaaacaaatgatgccacaaggcatgcagagttccgtgcgctgtaccttccgctttccttgcatgggaccaactgtttatttacggatcagttctttcttctaaccattctttcaagacaacggcatgattatacttctcgtcttttgcaccgtacagcagagttacctgttgatcctgtgctttttgcatgcacaaatttttgaattcgtgtgacgccgggttgctattcaattcctgtctgtaaagcgcctcaaacgcatcgtattttgcaggatcatgagaaaaccattttcgaagctcctttgatggagcaatttcctttgcccataaattgattcgggcattttcctttcttatgccccgcggccagagcctgtccacgagcacgcggaaaccatcggtgtccgccgccggctcataaatgcgcttgcatcgcaactcattcatcatggtcggtctccttcaatataaattcatttttacggtaagaaataagtccttccgcctgcattttagaaagttcattggacatggcactgcggttcacggcgaggtaatcggcgagctgttgccgattaaaggggatggtaaagtacgcgcttccgtgttccagggcctgctcggaaaaataagacaggagcctttcccttaaagatttggaagcggtatgtatcatgcgggaagacatgtttaaatttttttgggcagagatgcgaagcatattctgaatgatgcgattatgataggtacatcccttccggcaggtcgtcaaaacatgttttacatttagaaagatgatgtcggtatcttcgcatgcgatgacatcgcacaggagctcttttccgggaatggccgcgtagttttccgcaaagacctcccctttggccacatgcccgaaaataatgctgttaccccaataaaggttcacgacgatattgacgcttccgaatgccacgagcccgaattcatccacaggcgatccggctcggaagatgacgtcgcctttttgaaatttccgctcataggcgccgaggcagaggagaagctctgcaatttcgtcttctctaataccgcgaaaaagctgtgtgttcgccagaaaaaaagtattcataaaatcctccgatatgttgccaaaacaacgtatgcgttgctacgattttattatactataagtagaaaggcgagagaggaggagaaagcatgaatgacatggaggtcaacgaagagaaaaccgttggcaaggtcttttccatcggaaaggagaatccgccgattccgggatgcaccgtctcaaaagccttcggcggcgataaggggatcacctttttttccctggcgaagcatacggatattagcgcagaaatttatccctaccataaactattgatcgtggctgaaggcagcgtggcggtttacggaaaagacggcttttcgcaagtagtgcatgccggggaaagcatcttaaccgaggcggatgtccccgtgggcatgcaaacgacagaaggcagtgtgtatacggaagtttgcataggaaaggagagcaggatgaacgaattagtcaaagcaggagaagtttttaggctggaagacctggttccctatggagaaggaaagatcgtcaacatggatgtggtgcacaatgacaaaatgaagcttgtggttatggcctttgatggaggcacgagcctttcggaacacgccgcccccggcgaggcaattgtctttgccttagacggcgaggctgtgatcggatatgaaggaaaagagcatgtcattcgcgccggcgaaaattttcattttgcaaagggcggcctgcacgcggtaaaagcgacgaagaaatttaagatggcgcttcttctaacattggaataaaaagaaggggagatgaaaaattatgaaaaaacaaatcaagaacaatgtatattgggtcggaaaaattgactgggaacttcaggaatttcacggaacagaatactccgtgcacaatggatccagccaaaatgcttatttgatcaaagaagaaaagacggtattaattgacactgtatggactccccataaagaagagtttgtaaagaatcttaagagtgaaatcgagttgaaggaaattgactatatcgttattaaccatggagagcccgatcattcagggtctttattagaaattatggaggaaattccaaatactccgattttctgtacagccaatggtaaaaaatcgctcgttgggcaatatcatcacccggaatgggactatagggttgtaaaaaccggggattctgtggatataggaaacggaaagcaattagtgtttgtagaaatgagaatgcttcactggccggattcaatggcaacttatttgaccggagacaatatcttattttccaatgatgccttcggtcagcactatgccctaagtgaactcttcaacgacaaggcagacccgaccattctatggaatgaagcgatgaagtactatgcgaacattttaacgcctttttcgtcttttgctaaaaagaagattgaggagattgtagctatgaacctgcctatagacattattgcaacaagtcatggtagtatttggagagagaatgcccttgaaatagtagaaaaatatgctgaatgggcagatgcttataaggaagatcaagtcacaattatctacgactcaatgtggggagcaaccaaaaaaattgcccacaaaattgcagatgatataagagaactctccccgtccaccaggacaaaggttctgtctgtggcagaaatggacagaaatgacataatgactgaagtttttaaatcgaaggccatcgctgtaggctctcccacagtcggacaatctgcaattaccacgatttcgggctggttacactttcttcaagaacttaaatttaaagacaaggtagcaggagttttcggttcctacggatggtcgggagaagggaacaaagttttacgagaagaactcgaaaaggcaggttttaaacttatagacgaagaattaaaggcttcttggatgccggacgatgagtttttaaaaggaactgaaaagtttgctaagtctctactggatgcctcgacttttgaaaagaaaaattaataagagcgaatgtgctattttttcaataaaagttgttaatgtccaattgacagaaagatcttatttttgcaagtggtgcaagttggagacgacatcgtcacattggcgggcacccctatgggcatgggaacaacagagggcagtgtctatacggaagtttgcataggaaaggagagcaggatgaacgaattagtcaaagcaggagaagtttttaggctggaagaccttgttccttatgaagaaggaaagatcgtcaacatggacgtggtgcataatgacaagatgaagcttgtggttatggcctttgacgaaggcacgggcctttcggagcacgccgctcccggcgaggcaattgtcttcgccttggacggcgagggcgtgattgaatatgagggaaaagaccataccattcgcgccggcgaaaattttcactttgccaagggcggcctccactcggtaaaagcgacaaagaaatttaaaatagcgcttcttcttaccttgggataataggcgatcgcggcagtacaacgaaacacacaaaacaaaacacgccgggagggaatccatccggcgtgttttttttagaaggaaacagatgtgttgtttattgatttgtatcgtcagccgagtcgtcggcttcgatgaattctgcactctttgcaatggccgacacctccgtctggatgctccagctgttggtgccgtctaaatcgtcgcctttgggatagtagctgataccttccgaggtcgtgccgaaatgatggtccaccacgtcccaatccgcttcgctgccggggagatttttttacatcacatgaaagtgtgagagttgaaaaataaattagggaatagttcaaggtatgtatcattttgttggaacggtctttagaaaaaagggtgcctttaaattttctcacataacaatccattcccgctaattctgtactataataaagcaaagtagatatattttctttaaaggaggcgatgacatgaaaagaagttcgatggcgttgatgctctttttggcggcggtgcttctcgcaggatgcgccattggctcggccgagtccggaaaggaaagtgcgaagcgtgggaatggggcggcgaatggtaccgcttcaaaggcagtggccctattaaaccctgtgaaaggcgcgacgatcggatccgtttcttattatgtggaagacagaaaggtgtggaaggatttcgtggacgagaagtacgcgggctctgcgaagcgagaggatcgcggcctccacgtgccgcggattctcctggattccaaggacgcggccggggccaacaagcggatcgacgacatggtgaacgccatgaaggccacctacgagaaatatgagaaggaaatggaaggcaacgatcccggaatctatgccgctttttccgcctatcaagacgaggatgtgctaagcgtcatgatcaaaactttcgatctttgggaacaggggccggctcattacaccgtgtttaatttctcccttcccgacggcaagttcatcgacgacgatgcccttatgaagcatttcggcgtggcgaagggcgagctgttgggactcatcgaaaacagcttggtcgaagcacaggcgaaagaaacgagcatttattatcgagatagcaccgattcgtcctatttctacaatccgaaccactataccggtttggtgcttaacaatctctgggacaaaggccaggctccggatcaacggatctatatcgacgaagtgggcgcgcctatgtttgtctgcgcccaatccatcgatccggacgcgggactgtgcccgtcccttttaaaactgagggacgacaaatttgacgcagatcccatatccgatgtttatgtaagaatggcgagaaaactcggcgtcgatccggccgatgaaaaccacaaggccttcatcatccacctgggcggtgcctttgacgaagggagcttgaaagagaccctggcgaaattacacgtttggacaggcgtgttcacgaattgggaagatccgaacatgcttatttccgtgaaagagagcgagggcgcaggcaggccctaccttaacggcgaggaatgctacctggtgattcccaagtacaagaacgcctctgtttgcctcaaggaacttgcggtttcagagggcggaaagctgaaggaagtggacaatccctctttggatacccttggaaccaccggcatcacctttatttgccaaaacatcagcgacatcgccccaaacggcaagatcaccattcgctatagagacgatatcacggcattttctccctccatcagcttgaaggacggaagcatgatgctccccgatgaagtcaccgacgcggaggccattctccattggaaggatctcgtggaaaaagagggctattccaacatgatgtttgaacgcttcatgtccgttatgggcaagggttaatttaatttttgtaaggattcggaaaacataatagccatgagcgattctatttttgtcgcgagcgccttactttgtgttatgataaaggcgtcatcgatcccatggggtcgaaacaggataatgtctttcgttgaaaccatggctccggaataagcatggaaaaagagaaataaataaaacaaacctcgacatggtgatttatccctgccacgtcggggtttttcattggccgtgagccatggtttgtccccttcgcgggcttcggcggagcggggataagtatcgatgcggaggtagatttgttaagagaaaagaaaaaagccatagtcatgagtatcctcgccatgcttttgtgggggagtgccatacccttaattaaatgcacctttgtggagctgggcatcggaaaaacggacacgggactgaaaatatgggtggcgggcatccgctttttgctggccggttttttgaccatggtctattttaaagtgagcgaaaaggggcggcggatcgcctttaagaaagtgaactggaaattcgtcgtgatcctggctttgatccaaacgtcccttcaatacattttctattatgtgggcctttcccacgtggccggcgtgaagtcctcgattattcaatccaccaatgcctttctcgtggtgttgatctcggcggttctcttgcctaaggaaaaagtgaacccgaacattctcatcgccctcctgttggggactcttggcatcattatatccaatggcccggcggagaacaccggcaccattcactttgccggggaaggctttgtgctcatcgccaccacattaaatgccctggcctcggtcatgattcgaaaatacggaaagggcgaaaattcctttatcctcacgtcctttcaattcatcatcggtgccgtggtgctcattttcttgggaagagccctcgccgcaaggcccttggtcctcacggcgaaaggttgcgtcatgattttatacggcgcttttatttcggcgacctcattttccatgtggacctgggtcctgcaacactaccacgccaatgaattcggcgtctacaaactctttataccgatcttcggctcccttttgtccgtactcgtactgggcgaaacttttaccttaaacatggccgtgggactggcgctggtcctcctgggctcctttatcctaaataagaaaaaaataagtctcgtgaaataaaagagagattcgaaaataccgacgtaggattgcctgcgtcggttttttatgttgcgtttttgtgatcgatgctatttatgtgcagttgattttttcgagaaacctaatgaaaaaacaaaaaaatgaataaatcgattgaccacacggcaaaacagtgatagattaagggtgaaagttttcttcggaaacgaattttttctactggcggtaaagcccgcgagcgcaagctaattcggtgaaagtccgaagccaacagtccggtctggaggggagaaggaggcttttcggtttgttgccggatgccctttctgttcgttttctgaaatttgaaatagcattcggcacaaggttacgccttttgggaggctttgtcgccgaatgtttttatttgcggcaaacttccttggaaaagaagagaggaaggtgcatggtgaaaaagacgcaaaatggtgtcagccctttggcgacagagccgatttcgaagcttttgctccgctactcggtgccgacgacgctgaccctcatggtgaattacctttacaatatcgtcgatcaaatcttcgtcgggcagggcgcggggatcaccggcatggcggcggtcaatgtggcttttcccgtcgccatcctcgtaaacgccgtcgccctcatgctcggcgacggctgcgctgccaacgtgagcttgtgtttggggcgaaaggatcagaatacggcggatcgcatcttcggtcaaggcgtcatgtggatcatcgtgagcggcctcgtcatggccatgatcggcagtctttttgcgccgcagatcgtgcggctcttcggcaccacggatacggcctacgacgaatccctcgcctaccttcggaccattgccatcggcttcccctttcaactcatctgccccgcctttaccgccatgattcgtgccgacggttcgccgaagtacacgatgaaatgcatgatgacaggcgccgccatcaatgtggtcttcgatccgatcttcattttcgggctccatatgggggttgttggcgcgggaatcgccacggtcatcggcgaagtggtggccggagtcctgtgcctcctctatcttcgccggctcaagaccgtgcgcctcacaaaaggtgccttgcgcccgacccgggatttgacccttcggattttgaagctgggctttcccagtttcttgacacaagtattgaccgcattggtacaaatcgtgctcaacaaccttatgcgtatctacggcgccgtcaccatttacggcagcgacatggcattgtccgtctacggcatgatgatgaaagtctaccaaatggcccacgccatgttcgtcggcgtctcctctgccattcagcccattaacggctacaatttcggggcgaaaaactacgcgcgggtgcgccatacctaccgcatggccacgaccatcgccttgatcatttctgcattttggtccgccgtctacctcttgctgccccgtcagattgccgccctttttgtctcgggcaattccctttacggcgactgcgcggcccacttcttccgcttctacatgatggcctttttcctctacggcctccacatgaccacggcctccttctttcaaggcatcggaaaacccctccgctccctgctcattcccttggtgcgtcagggcgtcctcttgattcccctggcacttatgctctccgcaacctacggattaaacggcgcccttttcgccgtgcccattgcagatagcctcacctgtctgttgtgcatcgccatggcgtggacggaatttcgcgggtggaaaaagcggggatggcttacggaatgatggaataaggaattgagaaaagcacttacaaaagtaggtgctttttttctttcgtggtggggatggatttgttcgggaaaaaagcgcgcgaaaaaatggaaagtaagcttgacataaaaggggcgaccgattacactaaatgtaaagctagcttgtcatcatccggaggtgattccatctgaaaaacagactcgaggaaataagaaaagaacgcggcatcacgcaggcggaactggcaaatattctcgaagtatccaggcagaccatcggttccttggaaaacggaagatacaatccgtccattcttttggcctttaaaatcgccgcgtactttcaattgaccatagaagatatttttatctacgaagagggagcggaagatgaaacaaaataacacggttttgaaaaatttagtttttgcactttttggactggcgctgatcgtcctcggtattctcgcccacatgcacggtgtgagcgtcgagaaagggatcgtcgccatgtattatctgttgatcggcatcggctgcggaatattcggtcatcatacgggaaacatcattagctatttctctacgagaaataatgaggaattaaagagacaaatagagatcgaaaaaaacgacgaaagaaatctattgatcgcggaaaaagccaagtccaaagcttacgacttcatgatttatctgttcgctgccatgcttattatgttttcgttgatgggcgtcgataaattacagatcatcatcgtcgtagccatctatttatccatacaaatttacgccttgtattggcgatcgaaattcgaaagaacaatgtagacggggaggaaaagaaagtgaacaagaaagtcgtcgcttctatccattatgtcgaaattagtcggcattaacagaggggacaattacctttggaaggacctgccggggacgtggggcaacagccggaagcgaatcggaaaaagcaggcgattttgatggaggaaatttttatgataaactatttatgttaagtcgtaatttttaacaaaggagttttatgaataaaaaaacaagaagcataattttcgcctacgtcggcgtcctcaccggcgccggcctggccagcgggcaggagctcatgcagtactttctgtccttcggtctttcgagcctttacgccatcgccgccgtgggtgtgttgcacgtggtggtgggtggcatcgtcttgcaattaggcagccatttcgtcgccgagagccacatcgacgtcctcgacgaggtgacctccaccgccgtgacgaaattcatggactacgccctcatcgtcaattgctttttaatgggctttgtcatgatcgccggcgccggatccaatctgaatcaacaattcggcctggcgccctgggtgggctcccttctgtgcacggtgctcatcgtcgtcgtgggaatgctggatttcgacaaagtggcgaaaatcatcggagccttcacgcccctggtcctggtctttaccttgatcggtgcggtctacaccatggtcaaggccacgccggatgccgcgtttttggacgtactgggcaaaagcctgccgccggcgcttcccaaccttcccctctccaccattaactacttcggcctctgcatgatcagcggcatttccatggccttcgtcttagggggcagtaaaaccgacccggccgaagcccgcatcggcggcatgatcggcggcggtctcgtggccatcctgacagggctcgtcggcgcgaccctctttctcgccttggaaatcgtaaaagatgcggacattcccatgcagaccgtgctggacagcgtgcatcccgccatgggcctcgccatgtccgtcatcatcttcggcatgatctttaacacgggcatgtcccttttctattccgccgcgcggcgcttctcccacacagaaggcagctttaagcgaaacctgatcctcttcaccttggcaggcttcggtctatcttttatggggtttaaaaaacttatggccatcctctatcccatcttagggtatttggggcttatcctcatccttatcttaatcggtgcctggattcgggagcgcagcgaaataaaatccgagatcaaaaaaagaaagaaaatcaaccgcctcacgagaaagaaattagacgacgacctggaatttagtaaaaaagataaagaaaaactggatcaactggccgaagcctccattatcgaagacaaaaaaatcaaagaagccgtggcggaagaagtgtccgaagcattggaagacgaaaaagacgaataaattccccgtcgtagaagccccacgacgaggacaaaaaccggaagcatctgcgaaagtaggtgctttttttatggaggtggttttcaaaatttccgagcggtataataaaagcgacaacgactatcacttaaacgagatgaaaggagcacacaggatgacgctgaaacaatccatcctcataggccttgtgggcgcatgccttatgtttgcaggcgacatgaccctatactacagtcgcgacgattacgacagcaaagacacgatcaacagcattaccgccattatgaaacaagtggccgtcaaacggctatacatcggcggcatcatcggccccatcggtgcttttatctactgcatcggcctgtaccacatggtcctggcctgccgggaaccccacgaggccatgggacgcatcgtctacctcatcaatgccctcgggctcatactgggcggcgcctaccacattcaatgcgcctacttgggccttttatcccgccacgaaagccaaggcgccttcgatgaattttttaaattcctgaaattccaagccattatcacctttggcatcatggccataggaaacgtggcgctgagcgccatgatcctcttcggtgtaactctatttccccgcttcctggtgctgttgaccccggccgtgcttatactcgtcacacccctggtggggaaactgcccaaaggcccccacatgattattcgcggcggctggctcaacatcatctacatcatttactatgtctccctcttgatctgccaaatacttgaatgaaaacaggccaaatacttgaatgaaaatcagccgaacacttgaatgaaaagtggataaagacattgattgacgataaaatagatgcaagtattagctttatgtgacaacatgaggagaatgtcggaggaaaaagcactcgagaaacaatatgatttgtttttgtccagaaaaagcaggaaatcaaatcgacggattgaagccaggtgcaaaagaaccgacgaaggctttgtcgtactgaatggcagcatgattgaattgatcgattcgcaggcgataccgagatccataaaagaattgcgggatacctgtagaaaaaataatgaaatcatggacggaagagtgtgcaaaaaccatttgtttaacagcccttcctatgccgctgcctttgttttaggaaccaacgcaaatgggagaaccgaatggaaaacggaagacggtagaaccttaaaggaattggaagaggaagaagcgcaataatacctttttgtcggataataaattggataaggagaaaggagggcgcggtatgggtgaattgattgagtttcccgatttgaagcaatcaagggagacggttcgcaagctcaaacaggatctggaggcgcttcttttggaaagggagcatctccggagcgtggtttgtgtgaatattcaaagggagtataccttgattttcggtggccttgaatatcagctgtacaaagcgtcctgcgactaccttcgtttgcgtcgaaagaaggatttgattcaggcgaagaagaatcgccgggaaaggatcgatttaaaggccgtggaggcgcagctggacgaggaatttctcgagtacaagaagaagttggacgaaaagatgtcggaggtaaatcaggcactgaaggcctcaaccaaggaatttttgtcggaggaggagacgaaggcgataaaaaagctctacaagcagctggtgaagcgcctccatccggatttgaatccttctgcgaccgaggcggaaatcgaattattttaccgcgccacggaagcctataagcgtggtgatctaaaggccttgcgcctgatcgatgccattgcggagagtggtgagtctagggacgatgatttatcttccgctgtcgccttggaaaaggaatcggagcggttggaaggcttaatcgacggggtgcaaaaagacattgaagggattcgatccaatccgccctatatttggcgaatttatttggaagatgagaagaaaaaggcggagaaattgcgtcaactgaaagaggaattggcgaatttcaaaacggccatcaagacccagcaagagtatatttgtgatttaatgggggatgagcgatgaatcatttggcaaagggcgatcagggtgcgctcattcaataccttctacacaatgaaacgaccgtaaccttgccgacgcctttcgagcgggacatttatcttttcgatacctatgtggccggaacgactcacattgagggaattgaaactctggccccttcgcttcgggacggggatcggctggtcttttatcgggagccgaacaatacccacgaccctcaggcgattcgcatcgagacattggagaagataaaaatcggctatgttccccggcgggacaatgtggttttctcccgcctcatggatgcagggaagctccttttcgcaacggttgcggaaaaggagatgcggggcaactggctaaagatcgacataaaaatttaccttcacgaaagttaaggtagctgccgttcatttgaaaaacgcaaaaaaagacccttgcggccaatgtagagtgaccccataaagttggacttaatcgagtgagcatttcgcttgctcgattttgttttacataccattcgttctatgctgattgcatgcgttcacggtactctttcggactcagacctcctaacttttctttaattcgatcgttgttgtaatagcgaataaaattttcaatggcccgaacgagttcttgccggctttggtagacgtggccggcatagatttctcttttcagtacgctgaagaagttttccatgggtgcgttgtcgtagcaattgccttttctgg

SEQ ID NO: 57 - DNA, 13661 bp, Peptoniphilus rachelemmaiella
  source 1..13661: mol_type = genomic DNA
ccccttcaaggggtagccgagtaacgttagcacgggcagaccaccgacgcccttcaggcgcagctagtaatgcaggccctttgggccgaaaaaggaaaacccccggctacgccgggggatgtttattgtgctcagccgaaataaaaaacggctttttttaacatacaccttaccaccggattactttttgatataataagaccgactataggaaacaatgtgacggaaggagagtatatgggcgagataagttcatggtctcaaatcgactggcattttatcgccggcggtctgggcttgtttcttttcggcgtcaaactcatgggcgacagcttaacgaagtttgccggcacgaagatccgggactatattgaaaaatatacgtccaacccgctcatggcagtcctcgtgggtatcgtcatgacgggcttgattcagtcctcatcggcggccacggtaatcgccatttccctggtgcgaagcgggctcatgggcatgagccaagccatcgccatcatcctcggtgccaacatcggtaccacggtgacgtcgattttaatcggttttcaattggattacctggcctattttattttgctgataggcgtgttcctcatccttatggcgaagaagaaaaaaaccatctatttaggagaaatcatcctcggcttcggcctcttgtttatcggattaaacattatgggcgacgcattaaaagaactgcagtacatccccggtttttccgacatggtcgtccggcttagccgccaaccgatcctcgccgcactaatcggcgccgtggtcaccggcgtgatccagtcgtcttcggccatcgtcgggatcgtgcaaaccctctatgccaccaagtccattaccctggtggcggccctgggcctggtcttcggcgctaacatcggcaccaccgtcactgcggccttggcctccgtcggcggcagcctcgccgcgcggcgcacatccctgttccactttttatttaatgtgtccgtgtccatatttttcctggccattatcagcccctacgagcgcttcgtcatctacgtgtcgaagatgctccacttaaacgacatgatgaccgtggccgtggcccacttcaccttcaacttcgtgggcatgctcattttcctgcccctcatccccaaatgcgtcctgctcttgaaaaaaatcatgcccggacgcgacgacctcaccttggagctggggaaaattcagctggacgaagccatggttacggcattccccgccggggccctttctcaagccaaggcggccatattgcaagtatccgaaatcgtgcttgagtcccttcaagacagcaaagagtatctgttgaccaaagataaaaaacacttccacgaagtcaatcaattggaagacatgattaactccctagatacgaaaattgagtcctacctcttgaaaatttccaagcagtccctctccgaagaactggccgacgaatactccgccagccttcaggtgcaaaaaaactttgagcgcatcggcgacttggtacaaaacctcgtggaatacttcgaaatgatctacgactccggcgaggaatttcatgaagaagccatgaccgagctcacatccatttacgaactgttgatccacatgtacgtcaacggggtggaagtctttaaatccggcgatcaccacctttacgacgttatgaaagaagacgaaaacaacctcaactacctggaatacgaactccgcgcctcccatttcaggcgcatgacttcccaacacgaagaagccacggtgaccacctccctcttcgtggacatcttgggtaccttggaacgtatcggtgaccacgcctttaacatcgcgcgcctcaccttcgatcccataaagacccacggggaaaaatccctcctggcggaagaagtgaagggcgccacggcgggttgataaaataaaatgaagcggcataccgaaaggtgtgccgtttttttataaaaattatggggggtagtttttgatataatgtattaaataaaacaaaaaaaggaggtacctatgacattagcaggtcgcatagcgaatttacgaaaagaaaagggcatggccttggaaactttggcggaagccttggaagtgtccgtagacgatctaagggaatgggaacaggacacgcaggtgcccggctacggcgaccgcttaaagctctgcggctactttcacgtcaccatggcctacctcgaaggcagggaagcggaaggcgatgaaaagaaagggcgcttttcaaagagggagataatcctcatcctcgatgtcgccctgtttctcctgtgctttcttttggcgcccctctttcagtgggtggactgcaagatgtatggccaatacctgacgaattcccgagactacttacgccacttccccctaaacattctcctagccttcgcctgcatcgtcctcgtggtgcaagtgggaaagatgatttacgagaaggcaaggggaagcaggtaaaaacgaaatcaggcgaagaacaagcgcctgtgggaggacccttttatgtgttcagtgaacataggatgaaaaaatcctccattcagagaaaaaactgaattggaagctttggttgctccattgccacccggaatagatagaaaatgggcggcgaaaaagataaaataacggcaaaatagaagggaaaagaaaggaggaaccatgacaataggagaaaggatttactcccttagaaaagagcggggcatttcccaagaagaattggcaggttccattcatgtgtcccgtcaagccatatcgaaatgggaacaggatttggcggtgcccgacacgagcaatctgctgaagctttgcacgttttttgacgtgaccatggatgatttgacgggagaaggagccgtcgaccatggacgcagaggacagaaaaaactttttacgaggcacgagattatccttgccatggatgtcctcttgtttttaatctgctttctcttaacgccggtttatcaagagctggattttcgtcacggtggaagttgtttcgccaatcccatctactatgtaagaatctatccgctgaatctcttgttttacctcgcctgcatcgtcctcgcggtgcaagtgggaaagatgatttacgagaagacgaagggattttggtaattccatacaaataaatttttccaataaaaaaggccccgcaaggggtcttttctattgattgttttggggaagaaggcggtgcttgagatccgcttccagtgcttccagctcccgcttggccttttctctgttttcgtggccttccagttgaatctttcgtacctcatccagtgcggcgatgagctgctcgttggtgtagcgaatggtgtccacatccacgatgccccgctcgctttccctggccacatttaccgtgctttggcgcagggtttcggcgtttttcttcaggagctgattggtaagatccgacaccttcttttgggcttcggcggcttgctccgaatggtgcacgcccagggctaaaaccatttggtttttccagatgggaatggtgttcaccacggtggactgaatcttttccgccatgaccgtgttcgatgcctgcaccatgcgaatttgcggcgccatttgcaggctcaccatgcgggtcagttccaaatcgtggatcttcttttcaaagcgattggccatgttttgcaggtcgttggctttttgtgcctccaggcttccctccgtggccgatgccatgagggcgggaagctcgcggtttctgacatcttccagcttttgattgccggcgagaatgtacatggaaagttctttaaaatacttttcgttgaggtcgtacatttgatccaacatggaaatgtctttcatcaaggtgatttgatggccttctaagatgcgggcaatgtcgtccacatttttttccgccttgtcgtacttggccttcatggcggtcaccttgttggtggagcgcttcaaaaatcccttcaggcccttttcgtcttcgtcttcaaagctcttcagctccgtcaccacctgggagagaagcccgcccacttcgccgagatccttcgtgcgcacggaatttagggtcttttcagaaaaattcgagatttttttctgtgcccccacgccgtattgaaggattaccgaggaattggtcaggtcgatggtcttggcaaattcatccacctgcttttgctccgccggcgtcagcttcacttgggcgtccacttccttgggctccaaagtcagttccgattcgatttccgcgtcggtggcgccgtctaaggttaatttgatttcatcactcatggaattcgtctccttccgattcgtcgattaatccgtcttgtttcattaccgtttccatgacgtccatctcggcgttgagatccaagaggtcgtctttatacaaagtgtccaacaatttttcgtagccgtcgatgaccttgtccagggagcgcaaaatatcgtccatggtctttcgaatggcctcggtgatcaccgaggaggattcaaactggagaaaccgctcgatgagcttcatggtggtgggggtgtagtagtctacaaacttgtttaagctttctacccggccgggatccgtgttcaccgcatggcggatagcatccaagagcttcaagagggcggagatcttgtccttcatcacgtagtcgtgggcacgatcccgctgttcttttaacgtcttttcgtaatcttccatggcggtggcgcggtcgtcatccgtaggcgcctccgcctcgtcgatttccggcacatgttccttcacgggaacggtgcggcccatgtaattgtccttgtaggccttgtaggcggcgtgatcgatgaggagcaaatcgcctccttccaccaggcgggcctggggcaggtagtcttttcggatcatgtgattgatctcggcggccaccgtttgttggggcttattcagcgccgtgacgatgtcttccacggcgaggaccgattggtcttgaatctcccggcgaatgcggaagaaatctcgggccaaaatcatattgcgctggctaatcatcgttgccgcagcgaagaccgcggtggagatcaaaagaaagaggaacgcggcaatggtgtcggaggagaagacaccataggcgatgtcgtcgataaagaccatgagggcgcaaacaaaggagcccaaagccgaaagcccggctgcatttctcagccaataccaggtgttcggcgccgtcaccttctgcttcaccttggcgggatcccggtttacgggaaggcgcacgggctctttcggcccgaagccttttttcacgccccgcatgagggcgccggcgcccatcttcgagtactgaatggcgctttccacgcttttttctatgacatcggccacgtcctgaaagtcgtcgtcttccatggcgcggtccacaaatttttcaatggcatttttatctttcaatcccgaaactcctttcacgccttgtttttatccaaagcagtctactttaagtttagcataaggcaaaaaattacggggagttttttcgccttttaaaaaatctttaccgatacttaaacattaattctttttccgaaagccttgcaattgtctcccccttccttcataatagaaagaagtgaaataatcagataaacaaaccaactgagtagtccgcgggactgctttttttttgcaacgaggaggaacatttgaaatttaatgaatttaatctgtcggaagccattctaaaaggcatcgaggccatgggattcgaggaagcatcccccatccaggccgagagcatggcgccccttttagaaggcaaagacgtcatcgcccaggcccaaacgggcacgggcaaaaccgccgcctacggcattcccatgctggagcgagtagaaaaaaagggcccccttcaaggcctggtgctctgccccacccgtgagctttgcctgcaagtggccaacgagctggccaatttagggacctacaaaaaaggcgtgaaaattctccccgtctacggcggcaccagcatcgagcggcaaattcgcgccttaaaaggcggcgtgcaaattgtggtaggcaccccggggcgggtcatggaccacatgcgcagaaaaaccctgcgcttcgataatctcgccgtggccatattagatgaggccgacgaaatgttcgacatgggctttcgcgacgacatgcgcaccattttagacgagacgcctgaggatcgccagacctgtttcttctccgccaccatggaaaaagacattatggatttctcccgtaaattccaacgggacccggagatcattcgcattaaacacaaacagctcaccgtggaaaacatcgagcaatactatttggaaatgaaggcctccatgaagccggaaattttaagccgcctcgtggacatctacgatcccaccctggccatcgtcttctgcaacaccaagcgccgcgtcgacgcattggtgagcgaaatggcatcgagaggctatgctgtagacggccttcacggggacttgaagcaaaaccaacgggattcggtcatgaagcgcttcagaaactcctccatcgacatgctcgtggccaccgacgtggcggcgaggggcatcgatgtgggcgacgtggacatggtggtcaattacgatctgccccaagacgaggaatattatgtgcaccgtatcggccgcacggcccgggccgggcgcaagggcttgtccttctcctttatcgtgggacgggacatttacaaactggaagacatcgtccgctacaccaaggccgatctcgcctacatggaactgcccactatggagcaaatggacgtaaacaagcgggagaatctggaaggcaaagtggccgagctgctggattccgaggcggacctttcccggtacaagcccatggtggaaagcatgcttcgcctggaatacggtgccgtggaaatttccgccgccttattgaaacttttagacgacagcaaccggtcgaaaaaacacgacgcactggatgaggtggactacggcaagaaattccgcgcacggggcctgagaaaagaccgcaagggcaaagagaaaaagggaaaagccaacaaaaagcgcttctccaataacgccaagctctacatggacaagggcagaaaagacggcatcacccccaaagccatcctcgccatctttaaaaaagaaacagaccttggccgcgacgtcgtgggcaatatcttaattcgcgaccgccacacggtgatcgaagtgccgaagaaggccgccaaaagcgccattgagcaattagacggcatgaaaagccgcggaaaaacctatcacgtgcgggcatacagagattaataaggaaacaaacgggcaccgaggtgctcgttttttattggaaaaatacggattttcacagaaatgaaacagagcagaacttgattaaatacgagagactgggtatgattactttatagggatgaatgggcagagtgccgagccattccgcggaagtgacgaaagagaaaaggagatagatcatgagacagaatgataggagaagaaggctttttaaaaccttcaccgcctgtttattggccgtagccatgctgctaagcaatgtgggggccatggacgtttgggcggcaggtatacctgcgcctacaatcgatgatgtattttatggagccacaaccatctccggaaagaaattacaccgagacagagtcaataaccagactgtaagagcgacagtccatgtaaaattaacaggtacaaatggagaaaaagccaaagtatccgttacacctacaagcgggagtacgtggacagtgagtctaccggagggcgttgaagttgccgcaggagataaggtcacagtctaccaagaacttggtgagaaaaaatctcccgaggtaacggcagatgcgaaaccttccaaagcttacgaatacaaaactaaacttaaaatgccgacaggcgaaatttggatagaacaaacttcatccaatatagttaatgaagatgaacaagcagaagctgttcaattgttgaaagacgcaaacactgcaatagccaacgatattaaatcagttaagttttctattgacggtactgaccatgcttattatgaagtaacttataaagataattcgacaacaggtaaagtagaagctccaaacttaaaaataaaacaagttacagaatactcaagaggagctactcttggcagtattacaattgtagacaatgtaattaagggacaattagtaggagagggaccttttgacggcataaaagttcaaatacttcttaaacttagcgatgcggtcaaaggtagctattgtgataaagggaagtgtttaactgacaaagacacctctaatccggtagatgcaactgtagatggaacaacaggaaagttcacatatacaattcaaaaccctgacttaaagcttgatcaagtcgttggtgttacagtaaaagaaaaaaataagttcaaatcttgttcttcaactactgtaaaaccggtaacagtaggaaaaacggaagttaaagaccctagaaaattaaccgctgatgacaaaaaagcaattgatgctgctataagaaaagcatatactgtgggtgacacatctaaattaccaaacggaacagccgataaggatggagtaccggcagttatacaatttgatgacagcggcaatgtcaagatatttagcggtaatgatgtagcaggtacttgggacccggccaatgattataaatttgttccggaaaaaaatgaagatggttcatacaagttaaatgatggagctcaaccaaaaataacaattgcggccaaagacattctaaaaaacattaaaccggacgcacctgcggttgcggtagatacggataccggcaaagttactattactccaccggcttataaagatcctggtgatgataccgacttgctgtcttacacgattacctataaagacaattctggagcggagaaaaccgtcactgcaacgcgagatttagacaccaataaatggagcggaactggcgttgacgcggacaccggtgtgatcaccctgagtgtggaaaagatcgaactcgctggaaccgtcaaggcaaccgcaaaggataatggtggtcttgaaggtgacaccgataagctcgattcagatccggcaaccaagaagctcgaaactgcaactgttagctacgatgccaacaaaggcaccggcgatatggaaagcaagaatcttaacaagggctcaaaatacaaactattacccaatggcttcacagcaccggaaaacaaagagtttgacggctggacagtcaacggcgaagataaaaaagtcggcgacgaaatcaccgtcaacgaaaacacgaccgtaacagcaaaatggaaagatagcatggttgatgtcacctttgcaagcaacggcggtggcggaagcatggacaaagcaaccgtcaaaaaaggttcaaaatacaaactaccagacaacaaatttacggcaccggaaaacaaagagtttgacggctggacagtcaacggcgaagataaaaaagtcggcgacgaaatcaccgtcaacgaaaacacgaccgtaacagcaaaatggaaagatagcatggttgatgtcacctttgcaagcaacggcggtggcggaagcatggacaaagcaaccgtcaaaaaaggttcaaaatacaaactaccagacaacaaatttacggcaccggaaaacaaagagtttgacggctggacagtcaacggcgaagataaaaaagtcggcgacgaaatcaccgtcaacgaaaacacaaccgtaacagcaaaatggaaagaaaaagctccggtaatcgaagagtttaaagtcaaatttatcgccaacggcggcacaggttccatgaaggatttaaccgtgaagaagggtgctagctttaaactaccccccaataaattcactgcccccgaaggcaaagaatttgacggatgggatgtaaacggtcgaaaatttaccgtcggcacggaagttaccgttagcggcgatggcaatatgaaagtgaaagctctttggaaagtcaagggtacgccggataaccaagatccctctcaaccgggcaaacccggaagtggcactttctacatgggaagcactttgattatgccgaacagggcatctgaaccggcaaaaccggccatggaaatcggtcgccacattcgctacctctacggctacgaagatcgcaccgtgcgcccgcaaggcaagatcacccgcgccgaagcggcggcattaatcgcccgcttggcggaactggatatgagcgacaagtcgaagcccgattttgccgacacgccttccgcttggtacaactccgccattaatattatggtgaagaaggatttaatgttcggcgacaaaaacggcaatttccgcccctcggaacccattacccgcggcgaatttgcccgcgcccttctctatatcgacacgaggaacgacaaggtagcgcctttcgccgatgtaaagggccacaagttcgaagaagccattaatcaagccttcggcaacggccgcatcaacggctatcccgacggtaccttccgtcccgacgattacattcaacgggcggaagcggcgcgtatgttaaatcaatacgccaatcgcggcacaaccttggaaggcatggcgcctgttgccaaggatctggcccgcttcacggatatcgacgaaagccactgggcttattgtgaaatcatggaagcggccaacagccacgaataccaacgcgttaaaggcacccaagccgaaacgtggttaaagattctctacgacgacatgaaaaagtaaacacaaaagcccggcagcgggtttttgtgcaagaaaataaggcctcacggggccttatttttgtgttttgatttcgcctgtttcgtagagttttgccagcgtaagcagttcctcgatggtttctgctgcctgtttgccgccgtcggtgtcttttaccggccgcctttttttgtattccgtgacgaaggccaaggaggaggtaatgtcgatgtcgtcggctatgcggcgggcctcgtctttcatggggctatgggtggcgaggaggatgccgtaggaattagagatcagagtgtagcccgccgtgcccgtggtctttcggtaagcgtgggcgaagccgccgtcgatgaccagaactttcccatcggcttttacgggctcttcgccttttttccgcttcaccggggtgtggccgttaatgattttgcccaggtccgggtcgaggtgaaaggtgcggaggattttttccgcgaaatccacttcttccctcaggcggtagtagggatttttttcttccacgtgggtggcttcatcggcgataaagtagcgttcgaaggtggtgatccgtgctttgccgaaaaggggcgaggcttcgccgcaccacaaataaaacatgaggtccgccgcttctttttgtttttcgcctcgggcgaagaagctgtcccgcacggcaccatcgaaagcatccaatagcgcccgcccggccagaggctttcctaaaacggaggtgggggcgaagttgccagcatcgtctgtgggcaagcagccgtggaagaggaggttgtcgtttcgaatcaagtacatgctccccgattcgatcataaagcggatgtgtttttttagccgctcgcaaccggtgaagctttccgtgagcctgtccaccaccttttgctcctcgtccgtaaaggcgtaggggtcggcgggatccatggtgggaaagtctgtatccaataggggataggtttttccgcctacttccaccgtgcccgcgtcgagatccatgcggtgcaaaagggccatgtcgctcatgccatattccgggtgtttggcgatgagttggccttccgctttaaattgcaagatggccatggctttgtggagcttcgccaagctttcgttttgcgccgcgtgggggtcgggatttttcggataaaaaggcgccgtggccttgtattttttcgcgtagcgcaccaggggcaggagattgatgccgtagccgtcttcgatggtgtgaagcacattgtagcgcagggcgatgcgaagcaccgtggcgataagggcgaagttgccggcgcaggcgccgatccaggcgatgtcgtgattgccccattgaatgtccaccttcggcgaggccataaggtagtccatgatcttttccgcctcttcgccgcggtcgtaaatgtcgccgatgacgtggagggtgtccacggcgtagcgcacggaaagatccgccaggtcgcgaatgtaggtttccccttcgccgtaggccacgattttttcgtggagtgtcttcacatagccggccttgtggcgcagccccgcctcttccaataaaaggagattcagaattttctttcggtcttcgggaaaggtggcctcgatttgatcgtggtcgtatttcgccgccacccgcttcgccacgacgatgagatcggccaaggtggtctttaaaagggcgtcgtatgcgtcgggcgccagggcttcttgtaaaagcctcagtttttcttccgggtagtacaaaatcgtggccaatcgctttttctcggcctcggattttttcgggaagagctcgtcgatgtagcggcgcaaaagcccggaggcgtttcgaatgacgtgggtaaaggcccgatactctccgtgaaggtcgctgacgaaatgctccgtgggcttcggcagattcaggccgctttcaagtaagagcgcctcggccagggcccggtcgcgggacgggtatttttcggccaaaaggcggtagtaatttttttgtaattgggataattgctccatagtcccctccttacttgttctatacccagttttagggtataaatgaatagaaaagaaagagaggcgactatggatttaaaagataagatcagaagcataaaggattacccgaaagaaggcatcatctttcgggacattactacccttttaaaagacggcgaggccttccgcgcggccatcgacgccatgaaggatttagtgaaggatgaagccatcgacaaaatcgtgggcatcgaagctcggggctttttactgggggcgcccctggcctacgacatgggcgtgggctttgtgcctataagaaagccgggcaagcttcccgcagacaccatctccgccgaatatgaattggaatacggctccgacaaggtggaaatgcacgtcgacggcgtggaaaaaggggagaaggtgctcattgtcgacgaccttttggccaccggcggcacggggagcgcggcagtggaattatgtaaacaggcaggcgccgaagtggtgggctgcttggttttaatcgagcttcagggcttaaacggcagggaaaaaatgggcgtgcccgtctattccctcatggaatttcccgcataagcaataaaaaaacggcccgagggccgtggagcgggtgaagggaatcgaaccctcgcgatcggcttgggaagccgaggctctgccactgagctacacccgcataagtaaaatcattttactccttcacgaaaagcctgtcaagacaagggcgccgaaaaggcccggagctttcgggcaccgattcgccgcctgaaggcgcaaggggggggggggggggctgggggtttt

SEQ ID NO: 58 - DNA, 10771 bp, Peptoniphilus rachelemmaiella
  source 1..10771: mol_type = genomic DNA
ttgcaatcaatggtaatcaggcgtctttcttctgaaacaccggtgacctcgacatcttggattcctaaaagtaatgtggtaatattgttttgcacttgtttgcccccctttattattttgtggtgatataattttaggtgatagggaaaacaagtgctatctttttgcataaaaatatccattgaggaggttactccccaacggatattatagagccaaaaaaagcccttcggggccttttttattggcgaatatgctttatctatccatccttcgaatgaataataagcattttaccttcgtgtagcgtcacttctcccgcgtccttcagcaattcattgctgacgccacgggttttttttctgtaaagcgttaaatgatccacctcatacttaaagccatccgttgtaatctcgatggcatcggtaacgggaacgaagctcacgtagtgaaagccgagctgctccacgtgatatcggcccgggccgacgaggcgcaggcgattgttttcgtcgatcatgctgatctgcgcttattctcaatattgatcttgagatatcacatcttatggcagcttcattaatatagtaatctatctagtgaaatcacatctacaaccgtcttctctcatcaaacatacaaattgtgcaagccttaaagaaccccattctttaaggcttgcacattaaactagtcgtataattataatcttttatggtttcgtgagccgttcatctcttctataccccagtactgttataacgatggaaataaatactccaataaacagagagtcgatggacgtatccattacttcactagcgattacagctagcggtgacaacacaatagaagctaagataaattttggttttatcctcccccccatataaagtgcagttgttaaaggaacaaatacaactgctcctctcaagcccattgataaaaacccatagtcgttaatcaccgtatctccggttgttaaggataccatagctgccacaactaaaataacagcgatcattattcttgttgcaatgagctcgtattggggtgtaaagttagttttctttattttcttattaacattcttaaccaatatggtggccatccctaatgacaatcctgctccgccggcaaccacgctaatcagcagagttcctataataatccctgccacaagtggattaagatgattcagaacaaacgtcggaaacacctgtatagtttctgctaataccggcatattgtgtaagtctacaccctgtgccatcaacacctctgcctccgcttggagcacatagtgacttctcataaataagccgatcaaaatccccgctatacctaaaggaggaatcagaaacgccgataaaagcgccccctttactccttctttatcggacctggcacttaaaactgcttgcgcataggtttgcgtggacaacactcccaagagcaaggataaacccgaccctatgtctttcataggacctctggcaactaggtttaaaaatcgtctactcacatctgctgcagattcgattgccggcaatcctgtttcggcttggactgacccaatgccggtaaccaaaagttgattctggagattcgacattagccctgatactccgtttgaggttttaagggtgtaaaagagtcccaccaaggaggctaaatatagtaatagcagtttaatgacgcctcccatgccagctccccatgtacctccaaagataacatagatgatcatcagtcctattgatgccataacggctattaacagcggaagatgcggtgttagtgtcatgatgagccctgaacaagctatgacttgagccagtacactgagaaatatacctgtacaacatagcagtgaacataaacttcctgcgacagaaccatactcctcggaaatcatttccatttccgtcactttgccggtttttctcattctctttgtatatcctaaagcgagaaccaagcaaccaattcctgagccaagcgtaaaccaccaagccgatagaccatagtgaaaagctaactgtgctgtcccaatagtagcttgactactgaccaaagctcccataatcgaaccacatacgatccaagagcttactttgccgcctcctgttagaaagtcactggcagttttaattttttttccggaataagccccaactcctatgatcaataaaatcaccaggccgattccaaaaacagtccatcctgacatattcatcccacatccttactctctgctgtcatttaaccgaaaaattgctccatccttctgagtgcttctcgaatctcatcctcgccagctgcaaaggaaaatcgcacgtaaccctctccggctggaccaaatgccactcctggggtagtcacgacttggatttcttccaacatcctaatcgccaattcttctgacgacatgccggtctctttaatgttggcaaatgcataaaaagcaccttcaggcatgatacatgagaatcctttgatcttatttaatccttgaatcagaatatctctgttggattggtacacagagaccatttcatcaatgcaatcttgggggccctcgagtgcttcaatggccgccacctgagtcgctgtagttacattggccgtcaaacttccttgtaacaacgtcatggctttgattaaatcctcaggtcccacagcgtaaccaaggcgccatcccgtcatggaatatgttttggaaaaagaattgacggtcactgttctttcgaacattcccgggtagctggcgatgctatagtgactatgcccatcgaaaatgattttttcataaggctcgtcggaaatcacaattaaatcttcttctatcgccaattttgccagcttttccagttcttcttttggcgtcacagcaccggtaggattgttcggcgaattaatgatgatcgctttggttttactcgtaatatactgtctaacaacttctgccttgatgtgaaatttatcactttcatacgtcggcaccatcaccggagtcccattcgccagtgagatgtaccccatgtagttagcaaaacacggattaggaacgaggatttcatcaccttcatccaaaattgcttgcatcgtagacatcaatgcctgccccgctccaaacgtgacgatgatattttgcgcatcaacatccagcccgctatcacgtttcatcttttcagcgatggcctttcttagtggcatatatcctgcatttgccacatatttggtaaagccagctcttaatgccttgtcattcgctgcaataatattctcaggtgtagaaaatttcggctctccgattcccaggttaataacattatcatattttgcggccaaatcaaacatttttctaatgccggatacaggcagtctagatactcttgttgaaagtttcatctatttcactagctcctttcccttttcataacccttctctagtgctttaatattcagctgaacaatcttttgtcccttgtcctcaaaatgcttttcaacgattttctttgctgcatcaatactgatcacaccagaaacggctatgattaaacccatggtgatgatattagccgtggccttatgacctatttcacgagctaagccggaaatatcaactggaatgtccctaccctcactggcagcttcctgaacaacttctgccttgttataaataatataacttccttcaggcatattattgacatacctctggtaggcaatttgatgtaggcaaatgacaaaattcggcttcgtcacttttggaaagtaaatttcttcatcactgacaatcacgtcagatttagcaaaggtacctcgcgtttcaacaccatattcgctcgaaagtgttgctttttttctatcataaatggcggctgccttagcaatcaacgtaccacaaagaatcatcccttgcccgccaacaccactaatggtaatttccttttgtgccatatcatcttcctcccgctgcttgttcaataatttcctgataaagggtcccatagtctaactgatctcggttggcaaaaacacctgtcacatatttatcgacaagttcttcttcaggcatcgtgtcagccttggccttcgatactgtattgtccttgatccattgaagcatggccggggcatcaccaattttattggatcttccatagtgggtggggcacggtgagatgacctcaacaagagcgaagcctttcttagacatagcttctttaattaatttctgtagctgcacaacgtcaaacactgtagcacgagcaacatagggtgcaccactcgcagcaactaatttacaaatatcgaacccattctcgacatgaccatatggggatgttttggtaatcgcatgtttaggcgtggtacccgagtattgtccccctgtcataccgtagtttaagttatttaccaaaatcgctgttaagttgatgttccttcttgccgcatggattagatggttgcctccaatggtagcgccatcgccatctcccattagcgtaaccacattaagatccggattcgccaatgcgattccagtggaaaccggcaaggctctcccgtgcgtcccgtgaaacgagttcgtcgtcacatagtcatcagcctttccccagcaaccaatcccagttgtgaccactgtattttccttggtccaaccgaggctatccatacctctgaaaatggcctgtaacgtaataccattaccacaaccggcacaccagaatagcggcatcttttcttctagcaagtagtccttatacatgtttcattgcctcctcgattgccttgaaaatctccttcggaaagatgggttggccatcaatgcgattaacacctatcacaggaatatttctttcattccttttgtgaacttcatcaatatactgtcctaagttgagttctggcacaaccacagcttttgctgttttaagtatatttagaatctctttttctggaacaggccataaggtgatgatctgtaatatacctactttcagtccacgttctcgagccatctgcatagctgataaggccgatcgagctacacctccataagtgacaataactacctcggcatcatccatgaaatattttctgacaatgctaatgtcgtctacattatcttctattttattattcaggtgtttaatgatcctgtccgcattatcaggcctagcgcaaggccttccatattcatcgtgcatgcttccattaatcttaaaaatgtgcttgtctccgaaagaggccattggcgtaatcccatttgcatgttcatacggtttgtactcacccacgggacaagacggacctgttctctccacagtctcaacttcgtcttcatcgtataagaccacttgttctctcaagtgtcctacaatttcatccgctaaaaatataactggagtacgataggtttcggcgtaattaaatgccgtaatcattaagtcaaaacaatcctgcacactagagggggtgagagtaatgatcgagtgatccccatgtgttccccatctcgcttgcatcacatcgccttgagcaggcttcgtcgccaatccagtactcgggcctgatcgctgtacgtcgatgagcacgcaaggcacttcgcccatcacggctagacctaaattttctgccatgaggcttaaacccggtccgctggtagcggtatatgcttttttccctgcacaggaagcaccaattagcgcagccatggacccaatctcatcctccatctgtacaaacataccacctacttgaggtaaacgattagatgatgtttcggcaacttcactcgagggagtaatcggatagcctgcataaaatctagcaccagccgcaattgctccttcagtaatagcttcattaccctgcataaatgaatatctggccatcttaattttcccccttcgtaaccgtaattgcaaaatcgggacatctcatttcacacatcttgcatcctatgcaatcttccgggcgcaccacctcaggtctttcactttccttgtcaaaaacgctttttggacaaaatgtaatgcatatcctgcattttttacaatactttctgttaatgtcgatatgattcatcacaaacctccctactaaactgtttacacctttcccacatgaccacctatatcatcacacgatcagggtcaacttcttcaactaatactctaaagatttcttcccctggtacctcatatagtgtcgcttgggaaacatcaatggcaaatccggtattttcaacgacttcttccttgcttacgccgggaaagattttatccatgtacatccttttatcatcaccaaacttgaaaacaccatactgagtgactaccgttctcggtcctttatttggatttaaccccctcttagccctgccatccggaccgtcaatccatcctggactcgtgcaataatctaccttttctacaaatcgtcgtttttcatgcttcatcacgatgatcgtgtcacaataagttgcgataccattagcccctcccgagccggaaaaccgcgtcttaggatgcaagtaatcgcctatggctgtcgagtttaaattgccataagcatcaatttctgctcctcccaaaaatccagcatcaatgacattacgttgagccataatcgtctgaaatccaaaatagcgatactgcggccacaacacagaagcttcccgattaatccgcaaatcagacacgctagtcggaacttccaaaggatttccctccaaaatgccggtttcaaacagcaatctggcgttaggtgcagttgtatgtttggctagtgacgctccaatgaggggtaaaccggtaccaatgatatatacttttccatcttcaatttcattggctaaagcaatggccattaattgttttcccgtgtactccatgtctacctcctttttaaattttgagcatatcccaagtttttatctattttgattttttctaactgtcctactccaattttttcaagatactcttgatgcgaaacataagcatatttctttaaaaaatcgtcaaaaccttcgtctgtcctacttgctttgtcatactccaacatcatcaccggatcgtaatcataatggccaaaacattgcgatggatgtgccccgaattggcattccaccacagccgacacgcataatccgggtaaagtgttatgctcaggatgagatctcatttcctcatcggttaccacttcttcacatgtgataatcgtatggcgagctgccatggctatatcgacatcttgaaattccgccccttcaatgatacacatgccatcagggctagccttttgcacatgaatcaatgccacatcaattttgggagtcggaagtagacaaagcaccgatccagggttaaatgggtcttcttgaatcacaaatttttttgctggaagcttaggtaggtttttccgttcatcttcagaaatcccccatttgttcaccagatctgatccaagcatattttttacagctacataaggaagacccaaagctgcaccatggtacataattgtctgtacatctagggaataatcctccaccggcaatgttccgctctccactgcagctctaaatcgtctacataccatcgaaaagcctgagtttgcgatatagcccatattgactgccttggctaacttcgcaccaatgattaaatcaacatctccacccgctgccccactttcgatgtacaaatcctttttcccttgtcttattaactctctcaccaacgcatatggcttacgattcgttgaaaaaccaccaagtgctataagatcgccatcattaacaaactgtgatatagcttctttcaagctcatcaatttgttgctcacagaatcacctcatatttacaactcttctagaccattgtctaactaaatcttcaatccattaggattcctcattttttaaagatcataccgccgtgaacttttacacattcacaatcaagttagctgttttccaactctttttgtcgttcttcttctgatagttcatcaagccattttgtatcatgcccaaatatcgtccacaaaattagcaataccggtgttaccattaagaagaaattatattgtactagatcaaacggttttacacctagaaattctatcgctacggaagttgataagctccaaggcacaatcactgccattgccgtacatccaacgcccaacgctctcattagattctttctctgcaaacctttttttgcgtacaccggttccattatactgcccgcaaaagcataggcaaagttcatcgatgctccaactactgcaccaaatatgccaaagagcatggttgcaatgataatggaaactttagaacggagtcgcgacgtcaaaggctccacaaaggcgtcaacaatgcctgcggaattaagtataccgaaaagcccaaaggcaaagaaaaacataatagctgttcccgccatactcatcacgccaccacggttaagtaacttgtctacaaattcaacaccactgttgatttcatagccactccagaaataattcagcacatcagcaaggctatccccctggtataaacaagccacgactcctccaaatatagaccctcctaagattgccggtatggacggaatctttttagctaatagtacgatgacagccaccattgggagtaaggtaatgatgccggtattaaactcttttccaatggtatttacaatatcgttgataaggactgtattgacattcccgccagcgtattttctaccgaccagaaaatatatgaagcaacaaatcaaggctgaaggaactgtaatctttgcctgatgcttgatcccttcaaagagatccaccctagataccgcagacgccaggttcgggctgtccgatatcggagaaatcgtatcgccaaaaaatgctcctccacaacatgctccagccgtaatcacgggattgatattaagacttataccaattcctgccaaggccagccctgccgtgccaaatgtaccccaagaagttcccgtaatcaatgcagtcacagcgcacaagataaaggcagtcatcaaaaacatgttaggcgaaacggatctgactccaaaactgataatcacaggtaccgtacctgatgcattccaagttccaaccaatgctccaacacataaaatgatcatcgccggtacaatggcctttgagcagttttcaataataccattttgaatctctttataggtcgtacctgtcccaagactaacacccatggctacaatccatgaaatcaaaaacaaagcattaattttcgacccccaagccaacgatggtaccataatgaccgagaagactaaaatcattgacaccaatgcataagtaaagctcggttttttcttttctcttaatttcataagttcaccttccccttcttaaatttttattatttgctttctctcactaccttgatttgattttatatattatatatacttaagtaaaattcaaataagggatggtgcttatcgaaattctcgataatctgaaatcaatcattcagacattttgaaaggatatgttctatggatatcaaatatctaaaaagcttcataaaaattgctgaactaggaagctacacggcagctgctgcacacttaaactatgctcaatctactttgaacaatcaggttaaaacattggaacgagaattgggatatcccttattcgatgtcattaataacaaaatcttcctaaccaatgaaggtgcaaaattgttggattatgcatatagcgcagttgatcatgagatcgacttctttaattccattaaccaggagtctgtcgggaaacataaaatcaacatcggcgccgtcgaatcgattatgtcctccttcgtgatcgacgcagtcggtgaatttctcaaaatccatcctgaagtcaatattttcctcgatcaagatatagccggaaacctatttcaaagccttaaagaaaaccagctcgatattatcatcactatgggcgatcttatcgacagtgaaagcatcgctgtcatcggtcagaaaaaagtacaagctaaatttttcagtcgtaaagaccatcctctgctacaacaagaaaccgtacggcttagcgatatctgccaagaaaaacttgttttaaccggcaataactcttacgtgaaaaagcgatttgacgatatcataagaaaatccaaagtcaaatataattccagtatacgttctaactgggccagcgtcgtcatgtctctcgtcaaaaaagatcaatacgtcgcacttttaccggaatacctgatctatcccattttagatgacagtgatattgtgatattagatgttgacgactttaacctagaattctaccttcagatctgtcaccataaaggcaaatctctttaccctctgcacaaagaactagtcgacttaatcaaacttaaatggatggaaacagaacaactgacgcgttgaacaacactgctccaattatcttcacccaaaccacgatgcaatcacatcaggaggatgtaccatgcaaatgagtaggttcgtccaaataaaaaaggagcctagttttcactagactccccaatggttgacatagagccaaaaaagcccttcggggcctttttttaggctctataatatccattggggagtaatctcctcaatggatatttttgtgcaaaaagatagcacttgttttccctatcacctaaaattaaatcaccacaacataataaaggggggcaaacaagtgc

SEQ ID NO: 59 - DNA, 7956 bp, Peptoniphilus rachelemmaiella
  source 1..7956: mol_type = genomic DNA
gtaactttcatcatttccgcacgaaactgcttttcgtttgttcaaaagataagtgagtgagggtgtgtaggaaaacaaaaaggagcctagttttcactagactccccaatggttgacatagaaccttaaaaaacccccgtaccgtgaaagcaagtgctgcggtagagggttttttttatttgacgaattggccgccggtgtagagggcgatgaagccaagcatcaccgtggcggcgacataaaggacagcggcagccatgtggcctttttccatcatggccacggtttccgcgctgaaggcggagaaggtggtaaggccgccgcaaaagcccgtctttaaaaaaatctgaaggccggggttcatgcctcgggcttcggcccaggcggcgatgaggcccatgataaagcagccgatgagattggcgagaaaggtgggaaggggcaggccgtaatctgaaaggggcagtgtggagatcaaaaagcggctcgtcgctcccagggcgccgccggcggcagcatagaggacttgcattatgctctcgtcgccattttttgaataagacctacgaccacatcccggctcttttccatgtgttgaatgggaatgtattcgtagggaccgtggaaattcatgccgccggtaaataaattcggcgtgggcagccccatccaggagagtcggctgccgtcggtgccgccgcgaatgggctcgatgattggctcaatgccctcttcttccatgacctcgacacagagatcgatgaggtccatatggggctcgattttctcccgcatgttgcggtagctttcttccaaggttaaggtgatgcgctcgccgtattttttgtttaaaaagtccacggcggcctgaaagatttcgctcatgttctttaccttctcggcgtcgaagtcgcgaaggatgtagtccatttccgccgcttccacattgccgcggaattgatccagatggaaaaagccctcgtagccttccgtgtattgggggcgcatggcatccggaagcatgcggtccagctccatgcccaggctaatggcgttaatcatgtggtttttcgccgtgcctgggtggacgctgacgcccttgatgtccaccttggcgctgacggcgtgaaagcattcgtattgtacttccccgaggcgggagccgtcgacggtaaaggcaatatcggcaccgaaggcctccacgtcgaagtgatccacgccgcggcccacctcttcgtcgggggtgaaggcgatggccaaattgccgtggggcaaatcctcttcgatgagtgtccggaggctatccataataatggcgatgcccgccttgtcgtcggcgcctaaaagggtggtgccgtcggtcaccatgagatccaggcccaccacgtcctttaaggcgtggaaatctttgtcggagagggcgatatttttttctttatttaaaaggatgtcgccgccttcatagtggatgacacggggcttcacgccttcgccctttgccgcaggcgccgtgtccatgtgggacaagaggcccaaggtaggcaggtctttgtccacattgccctttaagtgggcggtgacatagccgtagtcgtcgaccttggcatcggaaagacccagctctttcagctcatccacaaggatatgggccaaatcgaattggcgcgccgtggaaggataggtggtggaattttcgtcgctggtggtgtaaacttgtacgtattttttcagtcgttcggtaatattcatggaagctcctttcattttttctaacttgtattgtagcacatatgcatgctatactcggggaaaaagaaaggggttttgctatgaaaatcgccattgtcggcggcggcgtcagcggtcttgcggcgggttgccttttggccgaggcgggcttttttgtgtccgtttacgagcgaaaaaatcgcgtgggaaaaaaactgctggctacgggaaatggccgagccaatgtgagcaatgccgatctctctttgtgccattggcatagcgaatcgcctctgcccttcgatcccggcacctatttttcagccgaggcccgtcgggaatttttcgacgccttgggaatcgacttggtcgaagaagatcggggcaagctttacccctccaccctccaggcccgcaccgtcttaaacgctctgcgccgccgcttgcttgcagcaggcggcgaggaagtggtggagacctgcatcgattcaatcgaacaatcaaagggcggctttcggcttgcgagcggggaaaattcttttttcgcggataaagtcatcgtggcgaccggcggcatggccatgccccaatcgggctccgatggcaagggctacggtctcataaaagccttcggtcacaaaaaaacccgcactttccccggcatctccgccctgctatgcgatagcccctatttaaagcatttaaacggcacgaaaattcaagggaccgtcaccctctttcgaaacggcgagaagatcgcctcggaaggtggggaaattcttctcgccaaagacggcatcagcgggccgccggtcttggatctcgctcgagccgtcggggagagagagggggcgtatgccgtcgcctttcccatgctcaatcatttggaacaacgcccggattaccgaaatattatcgagggcaggagctatcttccactggcggcggaggattttctcgacggcatcctctccaataaatgggtgcatgtggtattaaaggaatgtggcctgaaaggggaggagacgatggatcaactggcctgggaagagagagaacgcctcttgaatctgctctttgccttcaccctacccgtcaccggcgtgcggggattcgactacgcccaggtcacctgcggcggcatggcccttgatggcttcagctacgatctggaatccatttacgccccgggtctttacgccgccggggaagtgctggatgtagacggcgactgcggcggctacaacattcactgggccctggcatcggcccatcgcattgcccgggccattataaaaagtgcgcaatcatgaaaaaaacccctttacacaggggtttttctttggtattatgtatgagttgaaaccgcagacagcaggtggttcgccttaatttcctgccgaggtgactgaatttgattttggtactcgcattgtgtctgcaatgtgattttttttatgtagaaacgaggaggtgaatctgtgaaagaagagctactccaatcgaaaattgccttagtcgatgagatcaaggaaaagatcgaaaagtctcaatccattattttggttaacaaccacggcttaacggtggaagaagtaaccaaattaagaaaggaattgcgcgaacacggcgtagactacaaggtgtacaaaaacaccatgttgaaacgtgccttcgacgccaccggcaacgaaagcgccaacgaattactcgtcggccccaccgtcgtcgcattcggtatcgaagatgccgtgcaaccggctaagatcttaaatgatttcgccgaagacaacgatcgcttagaaatcaaaggcggtctcttagacggccgtgtcgtatctgtcgacgaagtcaaagcattggcgaaattgccgagtcgcgaagtgcttgttgcacacttgcttggcagcttgaatgcaccgattcaaggactggcaactgtcctgtccggaaacattcgcggtcttgccgttgcgcttaaccaaatccgcgaaaagaaagaagaagaatctgcctaagggcaaaaattatttacggaggtatatacattatggcatctgaaaaagtaaccgctcttattgaagagatcaaagaattaaccgttatcgaactcgctgacttagttagcgctttagaagaagaattcggcgttagcgcacaagctcccgttgccgttgcagcagcaggcgctccggcagctgcagcagcaggcgcagccgctgaagaaaaatccgaattcgacgttatcctcgcttctgcaggtcaagaaaaagttaaggtcatcaaagtcgttaaagacattaccggcctcggcttaaaagacgctaaagcacttgttgacggcgctccgaagcccgttaaagaaggcgctaacaaagaagaagctgacgacatcaaagctaaattggaagaagtcggcgctaccgtcgaagttaagtaagattttcttacgaaagtccccactcctgcgagtggggattttttattgcccttcatcgaacacgcttttcaccaatctgagaggagacgatgaaaaaaggaaaacagctttcgaaaagggtgggcggatgcgattggggcagtccgctaaagcgttgaaattcagcgattttcctttcactttttccatttgtccgtgtataatcgtcataggaaaacagaagaagggcagtgtgaaaaaagagtatgaaagaatttaagcgcgtttttccgaaaaccatccccctactaatcagttatctgcttttgggtatgggcttcggtgttttggttcgctccgtgggccgctccaccttggtgagccttttgatgagtttcggcatttatgccggcgccatgcaatttgccatggtgagtttgtttgcccaacaccttgccgtgttggagctggtcattttggccatttctattaatttaaggtatttgttctacaccatctctttgctcaatcccttggccaatgagcctctgtggaagaaaatgctcgtcacccatttctgcagtgacgaaactttctccctctacattacggcgggggaagacgggggcatggccgatgccgatgcgatgtaccacatcgggctgttgaactgtatgtactggctcgcgggcacactcctcggtgcccttttgggaagcgtccttcccattaatgtggaaggcatcgattttatgatgacggccctgtttattaccgcctttatcgagcagtggaagggaacggatcaccacttcccggcgcttttaggcgtgggggcttctgttctcgccgtccttcttttcggtcgcgacagctttcttttgcccgccatggccgtaattttaatcggcaatttgtattacaggaggaaatatgtcaactaaagaagtctatatcgccatcgccattgtggcggccattacctttaccattcgcatgtttcccttgtttttcttttcccgccgcgacaccattccgaaaattgtgaaggatttaggcgtgcttttgccctattccatgatgggacttttaatcgtctactgtttgcgcgtcatgcgtttcgattccttcggcggcttttttcccatgagtttggccgccttggtgacagcgggcagttatttatggaagcgcaagtccattctttccatcgttttgggcacggcggtgtatatgtttttaattcaacaagtgttcgtttgaaaaattcgtgatatactgttcgcgtattatttttaaggaggaagttatggaatcattctttaagttacgagaaaacaaaacggatttttcgacggagattttagccggcatgaccacgttctttgccatgagctacattatcttcgtcaatccggcgattctttctcaaacaggtatcccctggggcgccgtcttcttggcgacgattattgcatcggtggtttccaccttggtcatggggcttttcgccaatgtgccctacgccttggcaccgggcatgggacttaatgccttttttacttacactgtcgtcttcggcttgggctttacgtggaaagaagccttgggcatggtctttttatgcggcgtgatcaatgtgttgatcaccgtcaccaaagttcggaagatgattattacatccatccccgaatcgttgcaacacgccattagcggcggcatcggcgtattcatcggctacatcggtattaaaaactgcggccttttgagcttcaccttggatccgggcacctatcaagccttggacggcggaaccatcatcggttcttccgccgccgttcccgccttggtaagcttcaacaatgccggcgtccttctcgctatgatcggtttgttgatcaccgtggtcttggtgcttaaaaatgtaaaaggcgccattttaatcagtattttagcaacgaccatcatcggcatccccatgggcgtggtggacctgtcgaaactttcggaaagtccttctgtagcaagctccttccaagacctctccacggtcttcggcgtggctctcggcaaagaagggctgctgggtctcttcgcagatccggcccggattcccttggtcctcatgaccatcttcgccttctctttgagcgatacattcgacaccctgggtacctttatcggcacgggccgtcgctccggcattttcagtgaagaagatattcgcaacatgcaaaccagctccggcttcaaatcgaaactggacaaggcccttttcgccgactccatcggcacggtcatcggcgcctttatcggtaccagcaacaccacgacctatgtagaaagtgcggcaggcatcggcgccggcggtcgcaccggccttacctccctggttacggcagctatgttcttgttggccatcgtcatcgcaccggtggcaggcatcgtgccggcacaagcgacggcaccggtcctcatcatcgtcgggattatgatgtgtgcaagctttgcggaaatcgaatggacgaatttggaatgtgccgtaccggccttcttcgcttcggtctttatgggcctcagctattccatcagtaacggcatcgcagcgggctttattttctactgcatcgtcatgatcttaaagggaaaggccaaagagctgcacccgattctcgtcggctccacgattttattcttaatcaattacgcgcttatggcttatttggccatgtaagagaaaagaggcttcggcctctttttttgtgcgcgaaaagggctgtggaaaagaacgagacaggctataatggagggtgaaagagaaacaacgaaaggagattacatgaagacacagcaattactacaggccctgaaagaaaagacgtgggtgagcttaacccacgaagtgacgaaagacatggccatttaccaggcctttaatcccttgggcgagcgggtcctcactacattggaggaaacgggatcggacaatcgggaatacaccctgggcacctcccacggcacccacgtagacgcaccggcccattttatggcaggcgggaaaattttatcggacatttcgccgaaagagcgctacctgcccctttacgtcctccatttggaagacaaggtaaaggaagagcccggctatgccgtcaccgtagacgatattttggcctttgaaaaagaacacggcgccatcccggaaggagcctttgtggccttctcctcgggctggtacaagcggatttattcccaagacgatttcaccaacacccacgacggtgtggaagtgacgccgggctggtctgtggcggccctcgagtatttaagccgcacgcggaaaatcgccgccatcggtcacgaaacgctgaataccgacgccggccccgaagctgccgaagcgggagatttggtagcgcaacgcttttggctcaacgaaaacaaattccaagtggaagtcatggccaatttagatcaggtgcccgccacagggggcgtgattatgattaatgtccttcacattaaagacgccgtggcctttcccgccgaggtaaccgccgtattcgacgcataataaaaaagccattgcccgataaaaggcaatggctttttgcattagaaaacccccggttagaccgggggttccgtttagctttagcgataattgcccgttatttccagcgtgatatgatgagagaggtctgccaaccaatcacaatcaggaggaaataatgacatcactaaatcacacccatagtttatcacacacaaaatggaattgtaagtatcacgtagtgtttgctccgaaa

SEQ ID NO: 60 - DNA, 6533 bp, Peptoniphilus rachelemmaiella
  source 1..6533: mol_type = genomic DNA
tgtcattattccctcctgattgtgattggttggcagacctttcttatcataccattctgggaataacgggtgattatcgctaaagctaaacggaacccccggtctaaccgggggttttctaatgcaagaaagcgaagggtttcgccttcgcttttctttgatgatgctatttcatttaaatggcacaggggctgtagccgcagtcttggcattcggcgcagccaccggtgtggttcatggtgccgccgcacatggggcaggtatcgggattttccgtcatctgtttggcgatctcccgatttaattcgtcttgcagttctttgatgcggtcggtgccgtcttttttgtcgtttgtaattaaaatgccacttctggcgcagccgtcacgataaatggtgatgcccttcaagccccgctcccaggcgtagacgtaaaggtcttccacttcttccacggtaaattcattgggcacgttcaccgtagaggaaatggaggcgtcgataaattgctgccaggtggcctgcacattgattcggtcccgatagtttaaattcgacgtggtaatgacgtaatcgggcaggtcttcttctctggaaaggccttgggcttccatgagcttgcgaataatttccgtatacaccgtgtaataggtgtcttcggcgtgaagggattcggattttctcacgtagctgatttggaaaatgggctccacgccgttgctgcagccgatcagggtggagatggagcctgtgggagcgatggtgagaagctgggaatttctcagtccgtattcttcgatcagagccagcacgtcctcgtcggcgttggagcgaataaattcactggccaggaccttgtcttttcgatagcgagggaaggggccggcttctttggccatgagggccgattgacgcagggcttcgttcacgaggacgcggccgatttggttaataaggtttaaggattccgaggagccgtatttcacgcccattttaatgaacatatcggccacacccataatgcccagtccgatttggcgcaggtcccgagacagttcccgctgctcctttaaggggtgcagggccatgttttcgtccaggacgtcgtttaaatagatgacgccttcccgcaccagttgaccgaaggattcgaattcgaagcgggcaaatttgctgaaggggtatttgacgaattcccctaagttaatgctggagagattgcaggagccgaaggcgggcaggggctcttccgcacagggatttaccccggcgtattcgaaggtgtcgtcttcgctcataatgtgccaggaattgatgcggtctttaaagagcacgccgggctcggccatgtcccagttgttgtaggccagattgtgcatcatgtcccgggcgctgacttcccggcggattttttccccggtggcttccacgtcgaaggttaaggtaaagggcttatcttccttgtaggctttaaagaagtcgtcgccgcagtttacggaaatattggcgctggttaccttgtccaggtctttcttcacattgatgaagtccaaaatgtccgggtgagaggcatccatgttgagcatgagggcgccgcgacggccgcgcatgccgatgaggcccgtggtaagggagtaaagatccataaagctcacagcccccgtggtggaggaggcggcgttgttgactctggcgcctttcgggcgcaatttgtttaaggtgaggcccacgccgccgccatagctgtaggtgcgggccatccacttggccgtgtcgtaaatggattcgatattgtcttccacctggggcatgacgtagcaattggaaagggtgatctttttgccgaaggcatccagaccgcggcccgccaagattcgtcccgccggcataaattccttgttggcgatggcttttttaatggcggaattgccgccggagacccgttccaaaaagtcttcgaaactttccgaatcgtagcggtacttcttctcgtaaatgtcccgctgaagatccgtcatgtcccagccgtgttccctgaggcgggcgcgctcttggcgatagaggatgtatttcttcgccgccacgggatccttcgccatcagcgacagctccacggcatcttgaatggtctcgatgtccacgacctcttcgcccgtgcatttttcggtgacctccttggccacggcccgggccgcgtcttcgtcaacgcccctgtccgtctccgccatggctttttttacggcgatgacaattttctcgccgtcgaatgccaccacttgcttgtttcgcttccttacgttcattgcttcctccccttatttatccacaatctatcaacatattgtggttaagttctaactatttctgtcttacctctaaatgtagtatacgctttttatactacgctatggcctgactattttcaagatccttttccaaataaaaaagacgccgaagcgccttagttttcgtcgtagatcattaaattgtaatccttcattacctgcaccaagatatcgccgtagcaggggttggtgctgtagcccgccgggtgaagggcccgggcgtaggcctcggcactttccgcttcccgcaccggtgcgtagcggttcgccttggcgatgagcttgccgtagtcgtaaaagctctcccgggcggagttgtaggtgcgaaagccgtcttccacggacatcttccgcccaccttccatttcgatggtgggaagcaccacgcccttgcccttgatgccgaagtaattattgtagctcttcgacagttcgctttcgccgaaattcgattccaccgccgcctgggccaaaatcaccgaggggtagagatcgtatttctttcccactgcctgcgccagaggcgcaaaggccgtgaaaaaatcttcccggctgtggacgctctcccgattgggctcgtagcggggccgcataaagaaaaacgccacgataagcaccgcaaaaaacagggtgcgctttctctttttcacaattaatccgcctcgatgaccgtatcgggatcatctttcaaatagaaggtgtttttgcccaacgccgtcatgacgatgaccacggcgggcatcaggtagttaaatacggcaaagggcatataggccatgggggagacgtggagcacgcctttcatatacaccccgcaggtgttccagggcacgagacagctggttaccgtgcccgatgcttccagtgtagaggagagcatcttcgggtgcaggccgcggcggcgatattccggcgcaaacatgcggccgggcaccaccagggaaatgtattgctccggcatggtcatgttggacaagaggcaggtaaacaaggtggcggtaaccaggccggtgacggagcgaataccctgtaccaaggtcttgacgataatttccatttgccccgtctcctcggcgatgccgccgaacatcatggcgatgagcgtaagggatacggactgcatcatattcatgaggccgccggcggttaaaagcttatccaaactttcgatgcccgtttgggacacatagccgttcatgccgcttcctaatatttcgttcagacccacggtgggctgaatgacggggccgatcagcgtggccaccacgatgccgagaacgatgccgggaagggccggcagcttaaaggcgatggtgacgatgaccacaatggggggcaaaagaagcagagggctgatgacaaaagtgctctttaagccctctctcaatgccacaatccccgaggtgtccgccgagccgacggggccgctgtagcgggtggttaaaaaggcgaaaatcgccagggtaaggacataagtaatcatcgtgggcttgatcatggccttgacgtgggtaaagacatcggtgccgctcatggcaggcgccaggttcgtcgtgtccgacaacgggctcatcttgtcgccgaaataggcgccggacaaaatggcgccggcggtgacgggggcgggaatgtttaagccttgggcaatgcccataagggcgatccccatggtagccgccgtgccccagctgctccccgtggccagggaagtaatggagcaaatcaagcaggccgccacgagaaaaatcgacggctttaatatccccaggccgtagtaaatcatcgaaggcaccacgccggtggcgatccaaatacccaccaaaatcccgatggtgattaaaatcatcaccgagggcagggcctgggaaatcccccgcaccatggccttttcgatgctgtcccaggaatagccgatcttcagagccattaaggcggcgaaaatcacgccgataaacatgggaatatggggttcgattttaaattttaaaatgctcacgcacataatcaagacgaggccgaaaaagaccgtaagggcctcccacagcttcgcctttctcggcgcatttgtcgctttcatcgctacaatcctcctcgtggaatactttcctgcattagtaagtaagaatatatgaacacattataatataaaaccgtgcgccgcgctacgaaaaaggaaagctgcgcgccctttcatctctaagaaatcactaatttccggttttaaattcagtttatcaccacatcttcccataaaaaaagcccgccgaagcggactctttttaaaaggtattttagaagcctcccgtatccgggtgatcgtcgatggttttgccgacgcccatctttccgatgaggtagcccacggcgaagcaaacaagggaaggaacgaaccaggtaaatccgaattgacccaagggcaaggtttggatggatgcagccaggctgcccaggccaattttgtcgccgacggtttcgatgactgcgataacgagaacacctgcgaccatgacgatgtaagccatgtcgtagcgaacgcgtttttcaaacatcatgtagaataccaaggcgatgataatcgggtaaacgatggtaagcacggggcctgccaaagcgatgatggcatcgacaccgattaaggagagtgcaaaactgatgatcgtaacgataataacggtgacgccgtatttgatcttgccgttactgatgtcttcgaagaagttacctgcagcggaggttaagccgacggaggtggtgaggcaggccagtgcgacggccagacccaatgcaaccttaccgaagctaccgaagagcataccgactaagctaaccaaaatttcgacgcgggaatcgtctgcggtaaacatggagctaccttgtgcgcctaaataggtgagaccaccgtagacaacggccaaggcgacgaagcagaccaagccgaccatcataatgaaggaacggcgttctttttcactgacttcgccatagccttttcgaatcaagtcggcgacgacgataccggtgaacaagggtgctgccagagcgtcaagggtttgatatccttcatagaaaccgctgacgaagaagccgccgtcgtgttcgacgggaacaatggcacctacaggtgtaataatcgctttagcaataatgagaacgaggaagatcaataatgccggcgttatgtatttaccgataatatcgacgacgccactttctttataagcaagagcgaaggtaatagcaaagaatacgatggacgtaatgaaggcgggtgcattcgggaagaaaggcattacgccgacttcgtgcgtcgtagctgcggttctgggaattgcaaaagcaggaccgatacaaataatagcaacgagggataacagcttcgcaaaaccggggctgacgcgcttacctaagtcaacggcacgaccgcctgcaaaggctgtgatgaaaacggttagaatgggaatgaccgggtcggctaaaaggaagccgcacatggtagcaaaccaaccgtcaccggtggtaacacctaagtaaggcgggaagatcaagttacctgcgccgaagaaaatggcgaacagggccagaccacttacaaagatatcttgtgttcttttgttcataaactcatctcctttataaaattctaaggttcgttctacctttgtgtaacattatatctaaattacatacctttttgaagtaaatttttcaattaacgaaaactgtgtctattttgtcgtcagtgtactatatatttgtatacagctgtgttttgaccttaatattttttctattcgttaagcctttatcaagcattggggaaagacgcatttattttttcttccgcgacggctttttccggcaccgcaaaaataaaaacgcttgcctcgacggattttttcacggtgcggcgaaaaattttttgctgcgctgatccgtccttcgaggcacctttttctttttgccatggccttatttctccgtggcttttcatttagccgcggccgtatttctcctcgcccttcgctttttcattaccctacggtttttccgaatcttttaggcaataaacatcccccggcgtagccgggggttttcctttttcggcccaaagggcctgcattactagctgcgcctgaagggcgtcggtggtctgcccgtgctaacattactcggctaccccttaaagggg

SEQ ID NO: 61 - DNA, 4936 bp, Peptoniphilus rachelemmaiella
  source 1..4936: mol_type = genomic DNA
ccactacataggcaattaagcgctttgtcatctgcttgcccttggcggcaaaggagagaggtgcttcaaagcgcgcgccgcaatccttgcaatcatagcgtgtcttcttgacgcgaagaagcacgtgtttacggcgcatcggtgcgtcccgaagcacctgaacccggtgatcgtgaacccaagcgtgagccgagccacagtgaggacaaacccgatcttgtacgggtttgcaatcaatggtaatcaggcgtctttcttctgaaacaccggtgacctcgacatcttggattcctaaaagtaatgtggtaatattgttttgcacttgtttgccccctttattattttgtggtgatttaattttaggtgatagggaaaacaagtgctatctttttgcacaaaaatatccattgaggagattactccccaatggatattatagagcctttttttctaagccataatggcttcctgaatggccttcttcgcgtccaaataatcgcgggaaagttcaaattccttgcggtccccttccggcacctcgtaggtgtaggcgatggatttcttttttggggacaggacgtgaatcacatcgctcatccgcagggcttcgtcgatgtcgtgggtaatgaggatggtggtaagggcgtatttatccttaatggctaaataccaatcttgcatgctgccctttgtaatggcgtccaagcgggagaagggctcgtctaaaagcaccaggtctttcgagaagaggaaggtgcgcagaaaggccgcccgctgggccatgccgccgcttaatgcgccggggtagctatactgggtgccctccaggccgaattctttaaagtagccgtcggccgcggcccgggcttcttctttgctcttgcccgccaagcgcaggggaagggacacattgtcgatgatcttcaagtggcgaaggagcaagtccttttgcagcatgtaggccacgtgaccgggctggcccgtaacatcttcgcctaagagatgcaccgtgcccgcgtcgggaacgtcaagccccgccagaatattaaagagggtggtttttccgcttccgctttgccctaaaagggacacgaccttgccccgctcaacggaaagattcaccttatccagcacgattttgtcgccgaagtggcggcaaatgccttcgcctgttaagagcggcttattgggggaggtagtcattgctgaaaccgaagtctttcgggatttcccgatcgattaatttgtttttccaaagccagccgtagaaagcgttccaacgattgctgtcgatgatgccgaattgtttcgcatcggcgatgtattgttttgaaaggtaggcttggctttcgtcgaccattttcttatccaattccggagaggccttcactaaaatttcggcggcttcttccggatgttcggcggcgtattcgtagcctttggaaatggcggccagggcttttttcgccgtgtccggatcgtttttcaagaagtcgttgttggcgattaaaatggggctgtagtagtcgaattccgggtgggattcgataaagggaatgtagttggtttccaggcccgccgttttggctttaatgccgtcccaaccgtagtagacccatacggcgtccacattgctgtttaatgcggccacgatgtcggtgacattggagggtagaaggttgaccttggagaaatcgccgccgtcgtcttccaccatggttttaatcatggcaagttcgatgggcatgttccaggtggcgtaggtgtggccggtgagcttgcccatggagtcgatgcctttatctttcgcactcaaaaggccggaggtgttgtgttgcaccatggctgccacagcggtgacgggaaggggctcttccttggcccaggatgcggcgatggtatcttggaaggagacgccgaattcgccgccgccgttagccaccaggccttccgcgccgccttctggcggttgcatgatttcgagatcgatgccggcttcgtcgaagtagcctttttccttggccacgtaaatccccgtgtggttcgtgttcggggtccagtccaagaccaggcgtacttttttcttgtcgccgtcggcttgtttaccggcaccgccggcgcagcctgccagcataaagacggccaaaaggacgggtagaaggcgtttcatataacgtttcatagtatgctcctatcggtttaattgtttccaaggcatggcttctctttgaaagagattcaccaggcccataaggattaagcttaaaaacgagatcaaaaagatcacggcaaacatgcggtcgtagctgtaggcatttttcacgcgggtcatgtagacgccgaggccttgaaagccgccgagccattcggctatgaccgcccctaccacggagtaggaagcggaaatttttaaggcggagaaaaagccgtccagggcattgggaagttttacataagaaaagatttcccgtttgtccgcgcccatggcgcgcaagaggcgcatttcgtctcgatccgcggaggcaaagccttcgtagagattgacggccatgggaaagaaggtaacgataacgatgaggaccactttcggtgtcatgccgtagcccatccagagaaccaaaaggggcgcgatggccacggtgggaaccgtttgtgtgaggaccagaagaggatagagggcatccttcaaaaaggccgagcgatccattaaaaaggcgcagagaaagcccgagacgatgccgaagaaaaggcccatggcggcctcaagcaaggtgactttcgaatgaacgaccaacagagggaagtcctgcacgaaggccttgatgacctgtacgggcgaggggagcaggtaggcgggcaaaaggcccgaggtgctcaagagctgccacaggacgagcagggcgacgatgaggatgctccctctgaaaagtttactgatatttgtcgattttttcatcgatagataaaatggattctttgccgtgatttaatttaacgtagcacatgacggattcggcgccttcttccagcaccttggcttcgcattttcggagcaggtcgataatctcgtccatggaatcgccttcaacggtggtttcaaagggggccaccacgtaatttaaaccgctttcgtcgatgacggcgatgacctcgtcgacgatgcgtaccacttcttcaatgccgccctttaccgtcggcaaaacttgaatagccatactcgctttcatttattttctcctttcaataaaaaaagccgatgcacaaaaggcgcatcggctcgatccttttacagcattacctgtacaagttcaatgggttgagtagttctctctcagctatgagcacccctttacacatagagtatacccgattatgagagattataaaagttattttaggaaagtggcgttataaattgcctggatggatttatccgcctcttcttccaagacgccgacgataatattcatctcgctggccccttgaataatcacgcgaatattcacattggccccggccaaggcgccgaaaatatgggcgctggtaccgacgcgatttttcatgttgcgaccgacgatggtaatcagggcgatgttgtggtccacggaaatgcgatcggcattggtgaaggtttggagctcggcgaggagctgatccgttttatttttcaaatatttgctggcgatgaccagggagatggagtcgatggaagagggcatgtgctccaaataaatgtcgttggcttccaaaacggaaaggacttttctgtggaaggccagatcccgattcatgcggaatttttcgatattgatgacgtcgaagccctttcggcaggcgatccccgtaatgttttcgccttccgcatcgtcgggcacgtgggccacgatgtaggagccgtcttcatctttggcattggtgtttcgaatcaccacgggaatgttcttttcgataacggggaacatggcctcgtcgtgcatgaccttggcgccgctgtaggaaagctcgcgaagctcttcgtaggtgatctttttgatcttttgcggttggggcacgatggaaggatccacggcgagaaggccggagacatcggtccagttttcatagagatcggcgccgacaccccgggccacgatggcgccggaaaggtcgctgccgccgcggctgaaggtaatgattttaccggaaggcgtggagccgtagaagccggggattacggcacaggcgtgggcttctttcatttcttccaaggcgcggtagctggcctcttcgtcccattggccgttttcgtcgaatcgaatcactgtggcagcgtcgacgaaatcatagcccaaataggcggccaaaatttttccgtttaagtattcgcccctggagaggacgtaggatttactcaccttgccggaggtaatggtgtttaaaatatggtccagttccccgtttaaatcaaattcgatgccgatgccgtctaaaatttcgcggtagcgggcttcgatcatgctcataacttcgttggacgaaagtttatgcacggccatgttgtagagaagaatcaaaagatccgtcaccttttgatcgccgcttcgggcctttcccggtgcggagggaatgacatacaggcggttttcatcgctctcaataatatctttaacttttttaaattgttcactattggcgagggatgaaccgccgaatttacatacgatgggcataatatcctcctttaggtaatcttatcctattgtaagattttttctccttcgaaacaagtgcttttccgtgaaaaagcggtaataaacggcagaaaaaaagaggttctatgtcaaccattggggagtctagtgaaaactaggctcctttttgttttcctacacaccctcactcacttatcttttgaacaaacgaaaagcagtttcgtgcggaaatgatgaaagttacg

SEQ ID NO: 62 - DNA, 3413 bp, Peptoniphilus rachelemmaiella
  source 1..3413: mol_type = genomic DNA
ccccccccggggactatcgccaatacaaagagcgcaccttcgggggccgctctttttttgtttggaaataaacatgaaaactacgcaaatcattttcctgcaatggagtttatatgtaaaaaatataacgaaaccccgtaaagaagggattaaaccgccgatattgtttgtataaaaaataattatccctaattcatgcggattgctcccgaatttttttgaaaaataattaacaaattttcaccaaatctattgacggggctgtttttatattttataatgcagatagaagttggaaaacaattgcaaaacaattgagcaaacagacatatcaaaaagggaggcaataaaatgaaaaatgtcgttatcgtaagtgcagcaagaacacccgtgggttccttcgggggcgcttttaaaggtgtaagcgctgtagatttaggcgtagccgcagcaaaagaagccatcaaacgcgctggcatcaaagctgaagacatcgaagaagccatcatcggcaacgtacttcaagcaggtctcggccaaaacgtagcccgtcaagttatccttcacgcaggcttacccgaatccacgccggctatgaccatcaacaaggtttgcggttccggtttacgcgccgtatccttagcagctcaaatcattaaagcaggcgacgccgacatcgtattggcaggcggtaccgaatccatgagctccgcacccttcattttgaacgatgctcgctggggcgctcgcatgggcgacaagaagctcgtcgatgaaatgattaaagacggtctttgggatgcattcaacgactaccacatgggcgttaccgctgaaaacgtagcaaaagaatacgacgttaccagagatgaccaagacgaaatcgccgcagtcagccaacaacgcgccagcaaggctcgtgcagaaggcatcttcgacgaagaaatcgcaccggtcgaagttaaaggccgcaaaggaaaagtaaccatcgtcgacaaagacgaatacatccgcgacggcgttaccaaagaaagcatcggcggcatgaaacccgcattcattaaagacggtaccgttaccgcagccaacgcatccggtattaacgacggcgccgccatggttatcgtaatgagcgaagaaaaagccaaagaattaggcgttgagcccatggctaagatcgcaagctacgcatccgcaggtgttgatcccaagatcatgggtacgggcccgatcccctcttccagaaaagcaatggaaaaagccggttgggaattctccgaactcgacctcgtggaagcaaacgaagccttcgcagcacaagcaggcgcagttgctaagaccttaggtctcgacatggacaaaaccaatgtcaacggcggcgccatcgccatcggtcaccccattggtgcttccggtacgcgtatcctcaccacccttttatatgaaatgaaacgtcgcgacgccaagaagggtctcgcaacgctctgtatcggcggcggcatgggtactgcacttaccgtcgaacgctaaataagattaactgaaaggaagtgccatagtggactttcaatacctgattgtagaaaaacaaaacgccattgccacggtgaagattaataagcccaagagcttaaatgccctgaacaccgaggtattaaccgaactcaaccgttgcttcaccgccttggaaggcgacgatgaagtagctgtagtgattcttaccggcgaaggcaaggcctttgtcgccggcgccgacatttctgaaatgcaaccgcttaatgcggcagaagcccacgcatttgcaaaactcggcatggacacctttatgttaatcgaacggctttccaaacccgttatcgctgcagttaacggcttcgccttaggcggcggctgtgagctttccctcgcctgcgacatccgtatcgcttccgaaaaagccgtcttcggccaaccggaagtgggcctcgggatcaccccgggcttcggcggcacccaacgtctgccgagaaccgtcggcgtcggcattgcgaaagaattgatctacaccgccaaaaacattaaggcggatcgcgcctatgaaatcggcttagtcaacgccgtggtggcaccggaagaattaatgaatgaagcgacaaagctcgccgaaaccattgcatccaagggctcccgcgccgtatcctacgccaagggcgccattgtagacggtctgcaagcagacattcaaacgggtatggacattgaaaagtcggcctttgccctctgcttcgccaccgaagatcaaaaagaaggcatgaccgcattcttgggcaaacgtgccccggaatttaccggtaaataaacaatcgtttaaatagagaataggaggatttcttatgaaaatcggagttattggttcgggtacgatgggtctcggtatcgttcaagttgccgcacctttccacgaagtagttatcaagagtagaaacctgaccgacgaaaagatcgccaagatcatgggcaaggttgaaaaagcttacgccaagaatgtttccaaagaacgcatgacgcaagccgacatggacgctgccatgaaacgcatctccctcgtcgaagaatttaaagacctgtccgactgcgacatcgtcatcgaagctgcttcggaagatcccgaagtgaaaaaagactacttcaaacaatgcgacgaactttgcgacgcaaagaccatcctcgctaccaacacctcttctttgagcatcaccgacatcgctgcagtcacgggccgtcctgacaaagtcatcggcatgcacttcttcaatccggttcccgcaatgaaattagttgaaatcatctgcggcttacacaccagcgaagaaaccaagaagatcatcatcgacttaaccaacgaaattggcaagacccccgtcgaagtcgaagaagctccgggcttcgtcgtaaaccgcatcctgatccccatgatcaacgaaggtgtcggcatcgtcggcgacggcgtcgcttctgttgaagacgtcgataccgccatgaagttaggcgcaaaccaccccatgggccccttggctttagctgacttaatcggcttggacgtttgcctggccatcatggacgttctctacaacgactaccacgacagcaaataccgcgcacacgttcttctgcgcaaaatggttcgcggcggcaaattgggtcgtaagagcggcgaaggcttctacaaatacgaataatccattcaatttgaggctttcaaacgcttctgtcatacaaaatcgggtaggcttcggcctacccttttttgcattagaaaacccccggttagaccgggggttccgtttagctttagcgataatcacccgttattcccagaatggtatgataagaaaggtctgccaaccaatcacaatcaggagggaataatgaca

SEQ ID NO: 63 - DNA, 1240 bp, Peptoniphilus rachelemmaiella
  source 1..1240: mol_type = genomic DNA
tcgttgatcagacgctgggtgaacaattacaaacaatttggcgatgaaggcttaatgcgctctagaaataatcgtgcgtacagtgtagagtttaagttagaagccatcacacgctacgaaacgagcgaatgcagctaccaacaattggcccttgaactcggcttaacgaatccgtccatcatcgctaactggcggagacagtatcgggaggagggcattgaggggctgcgatcacacaagcgagggagacctgtgacgaagaaagacgaccgcaatcaagcaccaaatccttcaaagtcgagtgaagatcttgatgcttccacacgggaggcattggaaaaccgcatcaaagaattagaagcagagaatcggaaacttaccattcaaaaaatgttctgggagcagttaaggagtttggagaaggaagaagcaatgaagaaaaggcgaagatcgtcgccaaactccgagaacaattccaactaaacgagatcctcgccgccatcaactttcccaaatccacctttatgtactggcagaaaaagtggaacgaagaagataaggaccaagccttgaaagacgagatcttggccatacggcgcgaacacaaagactacggctatcgaaggatccacctggagctgaagaaccggggatgggcgatcaacaaaaagaaagttcaacggctggttcaggtcatgggccttcaagtccgcgcctatggcaggaagtacaagaagtacaactcctacaaaggcgtcgtcggtaaaatcaagaagaatcgaatcaaccgccgcttcaatacctgtatcccctaccaaaaaattaccaccgacaccacggaattcaaatactacgaaaaagacaaagcagggaaacttcaaacaaagaaactctacctcgatccgtacatggacatgtacaatctggaaatcatcagctacgtcctctccgatcagcccaacgggatcaccatgctacggggcttagaagaagccatcgagcggaccggcgcctgcccctaccgccgcaccttccactccgatcgcgggtggggttaccaaatgaacgcctatcaagccatgctgaaagaacaccacatcttccaaagcatgtccagaaaaggcaattgctacgacaacgcacccatggaaaacttcttcagcgtactgaaaagagaaatctatgccggccacgtctaccaaagccggcaagaactcgttcgggccattgaaaattttat

SEQ ID NO: 64 - DNA, 1014 bp, Peptoniphilus rachelemmaiella
  source 1..1014: mol_type = genomic DNA
gttccttccacgtagccgttactccacgggtaatcaaagctgttggtgatctcctcgaaccagttgttgtaggcacgtaagcagtggcgccactcctttagcccgcttttctttgcctcttccatccatgttgaaagagcggttctagcggatactttgtctttctgagaaaggacgtaggtgtaaaagccttcttttaagatgtaggcggtatgaatggcatcgctcttttcgagcatggtagcgacgaggcctttctctgtttctgtgagtttctgagccggttttttcagtagactgcggcttcgtttaaaccattttctttccgttgccgtcatccgtttctgctcccgcttccgcacgttttccaaagcccaatggacttggcggatgaagtggtaccggtcaatgacatgggtactttgtggaaagaaggtttctctcacgcctttaaaggtaccacacatatcgctgacaaagatttcgacgccacgtcgttccgcgcgatcaatggaagcgaaataagtcgctaaatccctgccgtaacgcgtcggaagaatgtcgatgattcgatgggcctccccatcagctagggtggtctggtacttgcttccgccactgtcgcccttaaactcgtcgatgcaaaagacacgagggagccgttgacgaggtacaaacaaacaagccacaatacgaaaaatactcgtcgttgaaatccccacttcccgcgccagctccgacaccgatcgaatatctcgaaaggcatcgaccacataggcaattaagcgctttgtcatctgcttgcccttggcggcaaaggaaagggaagcttcaaagcgtgcgccacaatccttgcaatcgtagcgcgtcttcttgacgcgaagaagcacgtgtttacggcgcatcggtgcgtcccgaagcacctgaacccggtgatcgtgaacccaagcgtgagccgagccacagtgaggacaaacccgatcttgtacgggtttgcaatcaatggtaatcagg

SEQ ID NO: 65 - DNA, 853 bp, Peptoniphilus rachelemmaiella
  source 1..853: mol_type = genomic DNA
tgttggtgatctcctcgaaccagttgttgtaggcgcgcaagcagtaacgccattccttttgcccgcctttctttgcctcttccatccactttgaaagggcggtggcggcggtttctttgtcgttctgagaaaggacgtaggtgtaaaagccttcttttaagatgtaggcggttcgaatggcgtcgctcttttcgagcatggtggcgacgagacctttttccgcctctgtaaggtctttagccggttttttcaggaggctgcgactccttttaaaccatttcctttccgtcgccgtcatgcgtttctgttcccgttttctgacgttttccaaggcccaatggacttggcggatgaaatggtagcggtcaatgacatgggcgctttgtggaaagaaagcctctctcacgcccttaaaggtgccgcacatatcgctgacaaagatttcgacgccgcgacgctccgctcgatcaatggaagagaaataagcagctaaatccttgccgtagcgcgtcgggagaatgtcgatgatccgatgggcttccccatcggccaaggtggtttggtacttgcttccgccgctgtcgcccttaaactcgtcgatacaaaagacgcgaggcagccgttgacggggcacaaacaaacaagccacgatacggaaaatactcgtcgttgaaatgcctacttcccgcgccagctccgacacggaacggatatctcgaaaagcatccactacataggcaattaagcgctttgtcatctgcttgcccttggcggcaaaggagagaggtgcttcaaagcgcgcgccgcaatccttgcaatcatagcgtgtcttcttgacgcgaagaaacacgtg

SEQ ID NO: 66 - DNA, 798 bp, Peptoniphilus rachelemmaiella
  source 1..798: mol_type = genomic DNA
ccctttaaggggtagccgagtaatgttagcacgggcagaccaccgacgcccttcaggcgcagctagtaatgcaggccctttgggccgaaaaaggaaaacccccggctacgccgggggatgtttatttgtgtggctttctccttggcgatgtgcgaaagtgaagcaactgtattgacgatgtgaagacgccgagtttatactggaaaaagggggaagaattatggcaaaatcggcgattattaatgtgcgcatggtgcctgcagtaaaaagtgaagcggaagccattttaaaggaaatcggcttggcgccctctgccgccatcgaacttttttatcgacaaatcatattaaaacgggggcttcccttttcggttgtgttgccggagccctcgccggatgtggccaatttatcgaaagaagcgcttttggatctcttgagagaaggcatcagagatttggaagtcgaccggtcggaagaggcgtcggcggttttctcccgactccttgatgaacgatcaagcggtattcgcctcggcgaatgaaaatgaatcgggtagaaagtgaatgataaaggaatcgagtgcagactcggttccttttttgcattagaaaacccccggttagaccgggggttccgtttagctttagcgataattgcccgttatttccagcgtgatatgatgagagaggtctgccaaccaatcacaatcaggaggaaataatgacatcactaaatcacacccatagtttatcacacacaaaatggaattgtaagtatcacgtagtgtttgctccgaaa

SEQ ID NO: 67 - DNA, 525 bp, Peptoniphilus rachelemmaiella
  source 1..525: mol_type = genomic DNA
gccatcagagaaggcggccgcaccgtcgcctccggggttgtatccaaaattgtcgaataacaaaaaaacaaatagcgaaaggacgtggaaacacgtcctttctctatttaaaaatacatatttctcgaagaaaagcgagagccctcttttttatttattgggcgtcttcattcttatgtcaacggatagacgagacaaacaggtttatcgattcatctttaaaatttcattcttacacgattttgaaacccgggggcagggaaaagagctcagagcggaagtaacccggtccccaagatttggacataccccctacctcaaatcgtgtataattcaattaaggagggaaaccatgggacgaggaaaactaaccgctgaagaacaagaaatcttacgcgccaatccaaatgtcaaatcagtcaacgaacaatacattttctatacgaccgaatttaaaaaacacttcattgatgcactggccacgggcaagcggcctaaacaaatcttcattgaagccggattcga

SEQ ID NO: 68 - DNA, 640560 bp, Porphyromonas bobii
  source 1..640560: mol_type = genomic DNA
agtgacagatagggatagggtgtctggcaaggcaaaggcctacctctttatctggtcggggggtgaaaatggggcgttatttggaggcttagaaaacttatactatctttgcaacgcaaatcagcaagcacggtgtggtagttcagctggttagaatacctgcctgtcacgcagggggtcgcgggttcgagtcccgtccataccgccagagaagagagcatagcgaaagctgtgctctcttcttgcatagatgtctatcacacttgatagccttagatgccatctactccaagtatatagtagcctcctattcacactaagggatgtgtgggatggtggcgtttgatgggataacaagctaacactaaggcggtagactttgtaagatatttttgtaagtcattgaggtacaacgagcctgcaaaatacctacctttggtacgctgtagatagatcagcgtacgactactataacaatacttaagctaacgttcgccaatgaacaccaatgacttttccatccgccacataggcgtagggcagcacgacgccgatgagatgcttcgtaccatcggggtgaagaccttagatgagctcatcaaccagactctaccctccaacattcgattggacaagcctctggatctccccgagcccatgactgagcgggagtttgctgagcatatatcagaccttgcatctaagaacgaagtctatacctcctacatcggccaaggctggtacgataccgtactccctcccgtcatccagcgtaatgtactagagaaccccgtctggtacacatcctatactccctatcaagcagagatctctcagggtcgccttgaagcgctcttcaacttccagtcggtcatcacggacctgacggcactccccttgagtaactgctccctcctcgacgaagcaacggctggggctgaaactgccttcttgctcttcaatgagcgctctaaggctaaggtgaagctcggtgcacgcaagatcttcgttgataaggatgtctttgcttctacacgtgacgtcatcctcacgcgctgtatcccacagggtatcgaggtcgtcctcggtaagtggaacgagttcgacttcggtgacgagttcttcggagcaatcgtacagtacccaggctcactcggtggtgtcaatgactactctgagtttgtagccaaggctcacgatgcagatatcaaggtgggggttgctgcagacctcctcgggcttgtcctgctgacgcctccaggagaatggggtgctgacgtcgtcttcggctcagctcagcgcttcggtgtgcccatgtacttcggtggtccctctgctggatacatcgcttgtcgtatggagtacaagcgtacgctcccaggtcgtatcatcggtctgagtaaggaccgcctgggcaaggagtcctatcgcctcgcactgcagactcgcgagcagcatattaagcgcgagcgcgctacgagtaacatctgtaccgctcaggctctgctggcttctatgagtggcttctatgccgtctaccatggtcccgaaggcctgaagaatattgcacgtcgtgtccactcttacacgggcttcctcgccaagaagcttcaggatctcggctatcgtctcctgcatgagaacttcttcgatacactctgcgtcatcctccccgaggaagctggcttcgctgctaagctccgtgagatcgcagaggagtgtcgtgtgaacctcttctatgctccctgcggtacggtcgctctgcttagtattgacgaaacgacactgcccgaagacctcagcgtcctctgctacatcttcgcttctgcccttggcaaggagagcaacttcaatgacgaagtcggcgaacacacgatccacattgatcgtaagttcgtacgtacctcgcccttcctctcatacgaagtcttcaacaagtaccatacggagaccgagatgatgcgctacatcaagcgtctcgagcgtaaggatatctccctgacgcactcgatgatctctctcggctcatgtacgatgaagctcaatgctgctacggaagtcatccctctcagcaaccctgccttctgcaatatccatccctatgctcctgctgagcaggtacagggctccctcgagctgctggagaacctcaaggggctcttagctacgatcacggggctgcccgtggtatcgctccagcctaattcgggtgctgctggtgaatacgccggtctgcgtacgatccgctcttaccatgaagctcacggaggtggtcaccgcagtaagatccttctgcctgcttctgctcacggtacgaaccctgcttcggcttcgcagtgtggctaccagtgtgtcatcgtagcgtgcgatgcgcatggtaatgtcgactgggaagacttcatgaagaagaccgaggagcataaggatgacctcgctgcgatgatgatcacttatcccagtacgcacgggatcttcgagacgaatatcatcgacctctgtaagcgcatccatgattgcggagccctcgtctatatggatggtgcgaatatgaacgctcaggtaggtcttactaaccctggcttcatcggtgcagacgtctgccacctcaacctgcataagaccttcgctatcccccacggtggtggcggtcctggtagtggtcctatctgtatgaccgaggctctcgctccttaccagcctacgcatggctatggcgtcgactacgagcccatcgaagggaacgtcgtctctgcatctcctcttggtagtgccggtattgatgtcgtctcctatgcttacatccgcctgctgggtacgaaggggcttgagcgtgctactcgcacggcaatcctcaacgccaactacatggcagtccgtctcaaggatacctatggtatcgtctacacgggggcaacaggtcgtgtcggtcacgagctgatcctcgactgccgcaagctcaaggaaacctacggtgtcgatgagagcgatatcgctaagcgcctcatggacttcggctaccatgctcctacgctttccttccctgtacatggcacgctcatgatcgagcccaccgaaagtgaaagtaaggctgagctggatcgcttcctcgaagtgatgcagtgcatctggggcgaaatgcaggagatcaaggaaggccgtgctgatgccgaagacaacgtgctgaagaatgctcctcaccctgagtatgaagtggtctccgactcttggtcacacagctacccccgtgagaaggctgcctatccgctgccttacctgcgtgagaataagttctggatcaatgtcgctcgcgtagacaatggcttcggtgaccgcaatctgatccccgccttctgtgcttgtatcgctcccacttcggaagaataagcactaagctaataagtaagtaacgcccctcccttcgtcctatctggatgcagggaggggcttctttttgcgcagaacttaaggtataagcttgcgaattagacattggtcgactactatctctcatgcttgctacttttgtatagagggggagatcgctgcttctatccttggtagtatttccccttctcaaaatattttagatattcagtctctatgttagcacctatagatgtggtatagagtgggggagagagcgaagggataagagtagccttcttactgtgctatatgctatgattcagtagattgtatccctctttttgatgactctttaggccctttgaagagcttcttcggagcgtccccaaagaactctttgggaaagctttgatatatagatacaattcttatctttgccttgtagagataagaatacactcagtaagtacaatagcacgaagcacaagagtacatcactcaactatatccatccaaacaataacacgtaagaaactatgaacgactccgctatcttcactctgattgaagaggaacgtcaacgacaactcaagggtattgagctcattgcctctgagaactttgtcagtgaagaagtcatgaaggctatgggtagctgcatgaccaataagtatgcagaaggctatcctggtaagcgctactatggtggttgcgaagtagtagacaagtctgagcagctcgctatcgatcgcatcaagcagctcttcggtgctgaatgggcaaacgtacagcctcactcaggtgctcaggcaaatatggccgttctcctcgcctgtctcaaccctggcgataccttcatggggctgaacctcgcccatggtggtcacctctcccacggctctgctgtcaatagctcaggccttctctaccacgctatcgactacaatgtcagcgaagaaacgggtcgcgtagactacgatcagatggagcagcgtgctctcgagcacaagcctaagctcatcatcgcagggggctcagcttactctcgcgaatgggactacaagcgtatccgtgagatcgcagataagatcggggctatcttcctcgtcgatatggctcaccccgctgggctcatcgctgcaggtctcctcgacaacccagtcaagttcgctcatatcgtcacctccacgacgcacaagacgctgcgcggtcctcgcggtggtatcatccttatgggtaaggactttgataatccttggggcaagactacgcctaagggtgagatcaagaagatgtccgcactcctagactctgcagtcttcccaggtgtacagggcggtcctctggagcacgtcatcgcagctaaggcagtagccttctacgaagctctccagccctcattcaaggaatacggtcgtcaggtcaagaagaacgctcaggctatggctgaagccttcgtacgccgtggctacggtgtcgtatctggcggcacggacaaccactgcatgctcattgacctgcgtggtaagttccccgaactcaccggtaaggtggctgaaaaggctcttgtagcagctgacatcacggtgaacaagaatatggttcccttcgatagccgctcggctttccagacctcgggtatccgtgtcggtacgcctgctatcactactcgtggtgtcaaggaagataagatggagtacatcgtctcccttatcgaccgcgtcctctctgcgcccgaagatgaagctgtcatcgctgctgtccgcaaggaagtcaacgaaatgatggctaactatcctatcttcgcttggtagatcttaccgatcaggtcgggccagtcggcgtgaacctgagttaacaagtgacccgaggctattgcccagagtagtgtatgctgctcttgcgcaagcctcgggctactcgtttttctatatatttgtattacagcgttcgatgagccttctcttgaggctttatcagtagcgctgatcatatcattcaaatagactcaatgaagaagttatttacaagcatggcctgtgcgctggctctctgtgtaggagggactgctgcgtgggctgccagcgctccctctcgagtgtctacccccgtgccttcgtatgacaaggggatcaacattatccctcgtcctaagcaacttcaggaactcaagctccctgcttttcgcctgacagcgactacgcctgtcattgcctctggtgattcagctgtgacgatcgctcgcttcttcaccgaaaagattaaccgctctacgggcttctctctgcgtgtagtgcccggtgctaaggccacccagcaggctatcttcgttcgcattgatcctaagctcgcccttggcgatgagggctatacgctgaactcttcttctcgcggtgtcgagatcgttgggcgttcggcgaaggctcttttctggggcttccaaagcttgatgcagctactccctgcggaggtcgagtctgcaggtaaggttgggactctccccacggcagcttggtcgatccctgccgttcgtatttctgatgagcctgccttcgagtatcgcggtgtgatggtcgatgtatgccgccacttcctcacggtagatgagatgaagaagcacatcgatattatctctatgtttaagatcaataagctccactggcacctcacagaggaccagggctggcgtattgagatcaagaagtatccccgcctgaccgaggtcggtgcttggcgtatcgaaggagatggcagtcgctacggtggcttctatacgcaggatcaggtccgtgagatcgtccgctatgctcaggatcgctttgtgacgatcatccctgagatcgagatgccaggtcacggtatgggtgctatcgcctcttaccctgagcttacctgcttccccaaccgtcgtaagtatatcgtacgtaatatttggggtatcgaagatgatgtctattgcgctggtaaggagtcgacctttgagttcatccaaaatgtactcgacgaagtcgtacccctcttccctggtgaatacttccacatcggtggggacgaatgtcctaaggatcgctggaaggaatgtcccaactgccagaagcgcatcaaggctgaaggtctgaaggatgagcacgagctccagagctacgtcatccgccgtgctgagaagatgctcgctaagcatgggaagaagcttatcggctgggatgagatcctcgaaggtggccttgctcctacggctaccgtcatgagctggcgtggtgaagatggtggtatccagtctgccaacatgggtcacgacgtgatcatgacccctggtagtggtggcctctatattgaccactatcagggtgatcccaagattgagcccgtagctatctgctgctatgctcctcttgagaaggtctacaactacaatccgatccccgaagctatcgctccagataagcggcaccacatcaagggtgcacagaccaacctctgggctgagtatctctataccccagagatcatgcagtaccgtgccttccctcgtgagatcgctcttgcagaagccgtctggtcgcccatctctggtcgtgacttcaaggacttcagccgtcgcctcgacaatgcgtatgtgcgcctcgatatgcacggtgcaaactatcatattccacagcctgagcagcccctacctaacgtagattcaaaggaaagctacgagaagactgtctcttcgctcaacttcatagccttcactgatagcgcagagctgtctctcaagacgactcgccctatccgtatcgtctatacgcgtgatggtagcacgcccacgctgtcctcggagagctataccatgcctcttaaggtcactaagagcgaagtcatccgtgtagcttctatcctcccctcaggtaagacaagccccgtacgtgagattacctttgagaagcagactcttgctcctgcagctaccgttgctaacctcaagccaggtctggctacgaagacctctattggagactactaccaggctactgatcttatcggtgtgacgaactggactaagggtatcgccaagcgtcctcaagatcttcgtcctgacgtcgttaagaatcacatggcagagatcaagcctaaggctgtcatcggtgatggctatgtgaagattcccaaggatggtgtctatgtcttctctacggaccttgatcagatgtatatcgatggcaagctcctcatcgacaatagcggtgaagtagctaagtcaagccgtcgagacaagagcgtagctctgaaggctggctggcacaagatccgcctgatcttcatcggagcagttcgtggtggcttccccacctattgggatggtgctgctgttgcctaccgcaatatcaaggacaacaagttcaccaacatcaccgaagatatgctggcacattaagccgcttcgcacacctcttccaatcctttcgactgagccctcgcctctctccttccgctggagaagggcgggggctcagccttctctactactttcaccttaccatctatgccatccagccttactccgaccgagcggacctataccattgcactctccctcactaagtacgtcggccctcgctctgctattgagcttattgaagcccttggctctgctacggctctcttcactgatgcggagcttcgtgctcgtatccttccccgcctgcctcagcgtatagcacagcagctggcttcgcctactttggttgaagaggccctgcgtattgaggagtgctgtcagaaggaaggtattcgtcccatcttctttcttagcgaggactatccagcgcctcttcgtgagattgccgttccacccatggtcttgtatgtgcgcggggagtatgtagcttgggcggagcgtaagcatgtgagtgtcgtcggtacgcgaagtatctccgactatggccgtgtacttacccagcaggtggtgagagagctgtcggctacttgccctgcatctacgattgtcagtgggctggcctacggagtcgatatacaggctcatgaggctgcgctaaatctgagtcttccaacggtggctgtgctcgcccatgggttggatacgctctatccgagtgcgcactggcggatcgccgagcagatcctgcgtgatggaggtgcttgggtaagcgaatatccgccaggggtaaagccctatcgtcaggctttcgttgcgcgtaaccgtatcatcgcagggctaagtgccgcaactatcgtcatcgaggcgggcgaacatagtgggtcgctttctacggcaagctatgctttggaatcgggacgcgaagtcttcgcctgtcctggtcgcttgaccgatcctgagagtattggatgtcataagctcatcgaggagcagcgtgcccatctctatcttggagcgtcctcgatgataaaggagctggggtggggggctttggatgaaggagcagaagcacatcccttctctacctctcttgtagaaaagccagctctcccttctccagcgagggagtatccacctcatcctttgctcgctatcttgatagagcagggtatgctttccgtcgatgagctgtcccgcctatcgggtatggacttgatgaccgtccgaagtgagctctttgacctcgagctggatggttggatacaagcccgagcgggaggttgctatagcttgtgctgaaggcgatgagataagaagaagcccttaggactgatcagtcctaagggcttcgcttatttgatacgttcggggctatttaccgaagctccatttgagggcgagtgtcggtgctacgagccactgaggggcatcgacattcttcgatatgcgtacttcgctacctatgctgaggttgaagtctggtgcgacacttgggatcttattgaggttgcaccacacctgtggctgcgacatgaacttgaagtctgtgtcccaaccgatgcggggatccttctgatgccaccagctgaagaagcccgtggcggtgatgagaccattgccaggagcgaacttccatactccgcagagctcatagttgtgtggctgggcaatcccacgtatatacttgtagagtggtgtgaggctgagcatcgtgcgacgctcggggctgagataggtgtaggtcacccccgtcatgaaggcatcattgagcgagatcgcacgtgagcccacaggttcgggagcattggcattgatgaagcgcaggccgccgtcatagcgcacgtgccaagagagtggaccctgccaaaagcgtaggttgcgcatgaacttccagttggcactcactgcaccctgctggaggaaggacatatcgacgaagtagaacgtatcgccgaagcggtcaaggctctgctgctctacggtcatcgtcatgcgcggacggtcagcctgtaccttggggtagaggtagcgaccgaggtcatagtgcagctggatattctgccccatagcgggtacagcgaggagggaaagactcgtgaggacgagagcccgaaggccgaggcgaaggctttgtttcatctacggattaagtgtgttaagctaaggatggtggccatctcgtgcattcatctgcaaaggtacaagaacagactggattagaagaaggtgggtgataattcatccagggatatatccccttataagaagagttttaggcattcttttattgatgatggccgtgaatctatattcgtcataggctcaaccaatatgagactcttgcctcagagtccttccccctactaattgtgctaagacatcgtgtactcagctccccgataatgcctctccgaagagatacacaagcccttcgctttatcgcgagtgctcctcttatccagcggaggaaaaagtaccattctcgcgaagaaaaaagcgccttcacgtagtggttttcctccatctatgcacgtagtcttaaagaccaggtacgtaaatccaaatatccacgtacgtagatattaggtccacgtacgtagcccaaacttatctgccactcgtccacaacttttatccctacgcagagcaacgacctaatagtaggttgactcgctgaccaatataggttagtatagtcttattcttatactactctgggtagcccttccttcgtcggttagagagctgatcctatcaggtcgagtgtggcttagccctcggagttgctgtcgtctgtggtagggcgaatgaagcgacggactgcgcttgaagtagaggctgtgtctatgggcaaggtgaagttgtttcgcagatcccgcatcgtgcgctgtaggcccgcaagccctgctcgcttgactgcggtgccagcaaagagcgctaagtactcttcctcgctcatcgcttcgagctcctcgggggagagggagagcagggcttcgcgtggagtgtagtcggcgatggtcgtaggccgagcatagcgattccatgggcagcactgctggcaggcatcacatccgtagacccgacgccccatgcgttcgcggagctcggggggaatctcacccttctgctcgatggtgaggtagctgatgcatcggcgtgcatcgatacgcccaggctcaaggaaagcatctgtcgggcaagatgtctggcagcgctcacagcgtccgcagaggttgcgcatcggactatccgtcggtagctctatgtcgatgaggagctcacccaagacgaagtagctccccgcacgtgggatgatgagtaggctgttctttccgcgccagccaagccctgcctgctcggcccaatagcgctccatgatcggtgcggagtcagagaaggcgcgccccgtgacggggagctgcagctcggagcgcatgtaggctaagagttggtcgagccttttcttgacgaccttatggtagtctcgcccgtaggcatagtaggcaaactgtggggcttcgggggcttgctttgtctcaggatagtagttcatcgctaccatgatgagcgtctttgtctcagggagaagcacgcgcgggtcacttcttagctcgcgattgcgggctaagtaatccatatcgccatggtagcccgtctcgatccatgagtcgtattcctgcagaatagcttcggggacagcgccagcttgggcgataccacaagcagagaagccgaggcgaagagcctcggctttaatctgtgtgacgatgtcgtgtggggagatggactccacttgtatggagaggtgctgctgtcgtcttaggagcagctaagtcttagttgttgtggaagacccacgctgagcggtgggcaggatgctccttcaccagctcgttgaggtaagcataggcctcagcagaggaatcaaaggaggtaagagcaagacgaatcgtgcgaccatggggagaacgcagtgcggtgagtgcggctttggggagggtagtgcgagcctgctctacgtaggtctggatacgctcctcggtgcgctcggtagcgatgatgatatagtagcggccgtcctgctcggtagaccagcggaggttgcctggctcatcttttgtcgtagcatcggaagaagcatctaccttcttttcttcaccgaagagctggcgtgccacttcgactgaaggggtgaagcctgcctggtagtgctgctccgtctcgactttgttcccccaagggaggagcgcaaggatggcgatgacgacagcggctgcatagcccagcgcacgcttggggaggcgcagggagatatagcggctgtcctgctcgcctgagagtgcttgtctaccgctggtcgcctgaggcagtgcggggagagataggggcgcatagccgtaagcgctggcgcttgtagcgagggaggcgctatctggtgtgaagcttaggtgcccttcgcgggagagctggagctccccgatgcctgagagatgatacgtgccctgctggataagctggtgacgcagctggcttacttcctcctcgagtacgaggcgagcacgacgaagcgatagccccaggagaagggcatagcgctcctcgagaagcccatcgctgtgggtcatctcggcattgaagtggagctcggcagagggagggtaggccagatgcttgctacggtcatagctggcggggagcttctctctgatgaatccacccaactggggcacgacgacgtactcgtggcgtagtaggagataggatatctgctcggcgaggcgactattcatactcttagtgcattatatatactgtcacaaagataacgataatagccataagtgctcataattacgtacatttgtgggcaattcaagtaatgtattattagctcaattactctatgacgattgatcagttcaacttcgctggtaagaaggctttcgtccgtgtggacttcaacgtgcccctcgacgcagacttcaacatcaccgacgacacgcgtatccgcgctgctctccctaccctcaagaagatcctcgctgacggtggctcggtcatcatcggctctcaccttggccgtcctaagaaggtcgaggataagttctccctccgccacatcctccctcacgtctctaagtgccttggcgtcgaagtcaagttcgctcccgactgcgtaggcgaagaagctcgtgagctcgctgctaacctcaagcccggcgaagctctccttctcgagaacctccgcttctacgctgaagaagaaggcaagccccgcggcttggccgaagatgcctctgacgaagagaaggctgctgctaagaaggcgatcaaggaaagccagaaggaattcaccaagaagctcgctgctcttgctgacgtctatgtcaacgacgccttcggtacggctcaccgcgctcacgcttctacggcgctcatcgctgcttacttcgatgctgatcacaagctcttcggttacctcatgggtaaggaagtagatgctgtgaacaaggtcatgcaggatatccagcgtcccttcaccgctatcatgggtggctcgaaggtctcatctaagatcgacatcatcgagaacctcctcggcaaggtagacaacctcatcctcacgggtgctatgacctacaccttcgctaaggctgctggtggcaacatcggcgcttccctctgcgaagatgataagctggatctggctcgcgagatcgtcgctaaggctaaggctaacggtgtgaacctcgtcctctctacggactctaagatcgctgatgccttcagcaatgatgctaagacggccttcgctcagaacgacaatatccccgctggctggatcggtatggacatcggccccgacagcatcaaggcttatcgtgaagtcatccttggctcgaagaccatcctttggaacggtcctacgggggtcttcgaaatggataacttcgctgatggctcacgtgctgtagctgctgctatcgctgaagctacggctaatggagccttctcgctcgtcggtggtggtgacagtgtcgcttgcgtaaacaagttcggttacgctgacaaggtctcctacgtttccacgggtggtggtgctctcctcgaagctatcgagggcaagaagctccccggtatcgcggctatcgaagactaagcgaagacgtagcttcggctacctcttttcataagacgctccccgcattcggctgtctcagctggatgcggggagcgctcgtttttcctgtccaagctctccgattacgtctttcggagggagggcaaaggggcttcatcgtggatctgaaaggaaggagaaagatgcgcgtatatacggcgatttccttgagtatatgcggaaggaaatttccgtatatacagaaatcttttttcgcatatgcagatatttattttcgtatatacagaaatttcgctgcgcatatacggaagtttccctccgcatataaggcgctcttaccagggcttagcgcgccctgattggaggagctgcctattcccctccagcgaggggaggcggtcggtgtggggagggagtgcgaagatcgggcggtggtacctttcggcgaagcgcacggtgtgcatcgtaccgctttggacaccgcattcgatgacgagaagctcggcgctgagggcggcttgcaggcggtcacgagcgatgaggcggtacgtgtcgacggacgtggtcagcggatattcggagagcacaagtccacccgaggcgatgatccgatcttggagtgcttgatgtgcctcggggtgtgcgcggtcaaggcccgtggcgatgacggcgatggtgcgccctgtcgcttcgagtgccccgtggtgggctgcggcgtcacacccataggccaggccgcttaggatgactcgccccttctccgcctcttcgtaggcgatgcggtgggccgcggcgagaccttcgggacttggctggcgtgtgccgacgatgccgaggatggaggtgggactttgaagtaaaccaaggtcgcccttagcatagagtagcacggggcgcgatccgcccaaggcgtgaagagctacggggtagtcgctggcgaagtaggggagtagtgtgatgcccgcttgatgacagcgagcgagctcctcctcggccagaggaagggctcgctcgatcatctcgcgatagtaatcgatgtcagtcggtagatctaagggaagttcggcaggtttagcttcgtcagagaggaagaggcgaaggagcttgcgtggcggaaggcccgctgcacgtagcgccaagagctctaagagctgggcttcgctggtcgctccttccccgttgagcatagctgggctattcttcggcttcgccttcctcctcgtcttcggcgagggtgaagatggagaagttgaccgatccgtattcgcgatgctctgcgaagtgggggagctcggagaagtcatacgtgccaggatgctccacgacgacgacaccgtcgctcttgaggagtcccgagctaaggatcatctgcgggagggtagcgatctccttcagcttataaggcgggtcggcaaagatgaagtcgaactgcggccttccgccctgcgaggtctggaggtagcggaagacatcggactgcaagacctgcaggcgtccttcttccttcagctcgcgagcgatggagcgaatgaagagcgcgtgctcccgtcgctgctcgagcgcgatcacacggctacagcctcgggagatgagctctgccgatatgctgcccgtcccactgaagaggtcaagggccgtggcgtcctcaaagtcaatgtagtactgaaggacgttgaagaggttctccttggcgaagtctgtcgtggggcgagcattaaagctcttgggtacgtcgaagcggcggcgcttgtacttacctccgatgatgcgcatgttctcttaagcttgtggggatgtggctgtctcgctcccagcgtgtgggaggctacggtagccttggatggtgatctgcgagatgtaggggcgaagtagttcgcccgcctcgtgggctgctccttggagctgtgccagcgctggggctttctcttcctcactgaaggcgatcgtgaggcggtcagtattcccctcgagagcgaagtgacgccagaaggcaaaggtgtagaagacgacttcgcctgctacgatctcctggctgtgccccgagatgatgggggcactattgtacgcctcgacttctccgcctacgaagatgaagagatccattgcgctggggcgaaggaggagaaggagctcacgtccttgggtagctctgctcttcgaccgctcttcctctactattggagagaagtgtggctcgggcttgacaagcaggagcgtgcggcgaaggaactgataggcctcgcgctgccagctgaggatgaaggtcttcgtgtcgtcagggagcgtgtagcgtagggcgctcaaggcctctccctgacgtgactctgctgcatcctcggagtgggggagccaaagctcatcccttccctcttggagaagggacgtggggacgaggacagcctgctctggctcgtagaagaattggacggagcggtagggatagctgaggaattcatacgtgaagtacagctcctgcaggacctcgtagacggagtgtgccgaagccgatgcctcgagcctcccgctatggatgcagcggggagtagcgacaccttccatcccctcggaggtgatacaaaaagcaagtccacccgaagtggttcggatggacaagctgtagtgagcagcctcagctgctgtgatctgtgggatcggagtcattactcccagttaccgttcgtcttagcttcggtcagagagccgacacgaagaccggggaaggcgttcgtcttagccttagcagcgtcgaccttctcacgtacacgacgttcgttcttcagaggattcaggtagctttcgtaagaagctgatgcctggaagacgggcatctggatcttcagttcgcccacttcctgctcgatagagctggctacgacctggatagaagagtcggggttgttggggatggcgaagagcttagccagatccgtgccgtcgttgagcagggtatccttagctgcgacccagacggtgtcacgacggatgagcccgcgacgagctgcatcttcttcggtgaggccctggtcacgcatggcgctggtgtagtcgccctctgcacggatgtagaatacacgaccattctgtacgaagtcgatcagctcttccttgttggcgtacttgtcgtagacgctcttgtaggcttcttcaaggcttgcgatcttcttgagctgcttctggagctctacctcaatcttagcctgcttcttgtcgaagtttactggtgccagcacactctggatcgtgatgtaggcaagtgccactacggccaaggctactaatgcgaggataactttcttcattgttggatctatgtagtagtttgagttagacgagtctcattgcatggagctactaaggccgttcctatgcctataattcgtaacttcacacggacaaagatagaaattattattacatgccgtatacagcgctccttagcgccctcagctctcttccgctggatggctataccagcgaccagcgggaagcactgggtaccctctacgaatatatagaagagccctcgccctatgcgctcttcctcctcacaggctatgccggtacggggaagacgttcctcctacgcacgatagctgatctggctcagcgagcgggtttgcgtgtggagctcatggcttcgacaggccgagctgcaaaggtcttgtctgcctctacggggcgccctgcctcgacgattcaccgcacgatctatcgagcatctacgcagatgcaggaggagggcggtagcttccagctggggcgagtaagtggagcgactccgacactcttcatcgtggatgaggcatcgatgatctcaggagatacgggtgagatgacgccctttggctcgggcaaccttcttgatgacctcctgtcttatgtctggtctgcggatgaggctaagctcatctttgtcggtgatacggctcagctccctcccgtgggtactcctctcagcgatgcgctcaatgctgaggtccttacctcacgctacgggctccatgtctacgggatggagctgcgtgaagtcgtgcgtcagaagcgtggagggatcctgcataatgccacccagctccgtgagcttctggacgaatatgctgatgaagaccctgaggagatcctgccgattcatctggagacagagggatggcgaggaatcttccccgtcgaaggcggtacgttcatcgagacgctggatgaggcttaccgcaagtatggggaggaagaatgcttggtcatctgcccatcaaataagctcgccttggagtgcaaccatgctatccgtagctccgtcctcttctatgaggaagagcctgtggtgcgaggtgaacgcctcatcgtcgctcgcaacaactaccactacaccaagcgccccgaccgatctgacttcattgccaacggtgagatcatcgaggtgcagcgtatcggccgccactactacgagtatggcctgcacttcgccgatgctaccatttacctccccgatcgagatgactcgctggaggtgcgcctcctgcttacttcgctcgaagatcccactcctcagcgcactcaggctgagcgtcagcgactctttgagctaattgcagcagactatgctgatatcccttcggtcacagatcgtcgcaaggctatacgccgtgatcccttttggggggcgctggaggtgaagtatggctatgccgtcacggcacataaggcgcaaggggggcagtgggcttgcgtctttgttgacctgagcttcgtcggctacctccccgaagatcgcaatttagttcgctggatttatacggcgattacacgtgctacgaagcgggtttaccttttgggatatcccgcaggtctcgtagactaaattcccattattctcttgttcttaatcccaagattgagcttgcctgagtatggtacgctttcgggagctgtataagggtgaaaaagaaccagtactgctcagcggtcggaccagtactggtcgcagtggtgaccagtactacttcatatatgtgaccagtactggtcaactcgtcgaccagtactggttcacactacctcccttctgagattgctttggtgttcctgttacattgttcatttgtagctgtatatgatacgtgttcgctcgtggggtaacctccactcatagcagcggaaaaaggtacgacttcctgcacatcagatagggttatctaatgcatctctttggcttgccttcaaagcctgcagagatccactgggtgtaggcgcttttttgctatctttgggcacttcgaaattggaacaatagcacgcttacacatcattattatatggaagaacaaacccttactacagaggtgtcccgcgcgaagcgacgtaaccccattgcttgggtacccagcgtctacttcggtatggggctaccgtacgtcgctctctcgcttgtctccgtcctcatgttcactgacctcggtattgacaaggaggatgtgactttctggacctcgctcttagtcctaccttggtcgctgaagcccctcttctccctcgtcatggagctcttcgggacgaagcgccagtatatctatatcaccgaagcggtctcagccctgatgtttggcttggtttgcttctcgctgcccctgccgagcttcttctctatctctatcgccctgatgggggtgctggctattagtggctctatgcacgatatcgctggggacggggtgtatatgcaagagttgagtccagcagagcagggacagttcgctggctggcagggtgccttctataacctcgctaagatcttgactaatggcgggcttgtctatctggctggctacctctcaaagagcatggggctggagaaggcttggatggtcatcatggggatctgtgctgtgctgatgctcgccctcgcgctatatcatatgcgtagccttccccgcgaagctgcacgcgtacgccgctctgcggacgagagctggaaggagctggtgcaggtctttatctcattctttgagaagaagcatatctatctctatctggtcttcatcttcctctatcgcttgggcgaagggcttgcgatgaagatcgccccgatcttcctcaaggatgaggtcgctaagggcgggatagcactctccaatgagaactatggcctgatttatggtacggcaggtacgattgccttcatcctcggctccatcctctcgggctactatatctcgcactttggtctgaagaagacgctcttctcgctggtctgtatcttcaatattccctttgcggtctacctgctcttggctatcttccagccctccaacctctggtggatcggtacgggtatcgtcttcgaatacttcagctacggcttcgggttcgtcgggatcacgctcttcatgatgcagcagatcgctccagggaagtatcagatggctcactatgcttttgctaatagcttgatgaacctcagtgtcatggtgccagggatgctcagcggtaagctcgcgacggccttcggctaccagaccttcttcatcatcgtcctcttagtcacgctgccagctatcatcatggcgatccgcctgccctttgctcacgcagtagaggctaagaactccgactcaaaatagattctcaactactccaatattaatattatatagtacgtacaatgagtgaacttaagatcgtagggcaagccctacccaatatgccttgggaagatcgtcccgaaggctgtaaggaggtcgtctggcgctacagtgccaaccccatcatcccacgcgacctgctgcctacctccaatagcatcttcaatagcgctgttgttcgcttcggcgaaggctatgcaggggtattccgctgcgacgatacgaaccgccgtatgcgtctgcatgttggcttcagcgatgacgcgatcaactggaatatcaaccccgagcctctgaccttcgaatgcgaagacaaggagatcggtgagtgggtctatggctacgaccctcgtgtcgtcttcatcgaagaccgctactatgtcacttggtgtaatggctaccatggtcctacgatcggtgtcgcctataccttcgacttcaagaccttccatcagctggagaatgccttcctgcccttcaaccgtaatggtgtgctcttcccccgtaagctgaatggcaacttcgctatgcttagccgccccagcgacaatggtcacacgcctttcggggatatcttctacagcgaatctcccgacctcgaatactggggccgtcaccgccacgtcatgtctccagctccctttgaggatagcgcatggcagtgcacgaagatcggtgcaggtcctatccccatcgagacgagcgaaggttggctcctgatctaccacggcgtactggcttcgtgcaatggcttcgtctatgcctttggctctgcgctgcttgacctcgatgagccttggaaggtaaagttccgctcaggcccttacctcatctctcctcgtgagcagtatgagtgtatgggtgacgtccccaacgtgacgttcccttgcgcagctctgcacgatgctgagacgggtcgtatcgccatctactacggctgtgcagatacggtcacgggtcttgccttcggctatatcgacgagatcgtcgagttcacgaagaagcactcgatcatctaagctccctgagtatagactcatccaataaggtgaggcgcataggtacatcactcctatgcgcctcattgcctttatttatagtgctctcacgggctctatatatcatataatcttattatctttgccacagatatttggagcccacagaccctatgacgaccctgcaccaagagggtgagtggctgatgggcttatctggacgacagaccagtggagagccgagaggctgtcctcaacaccctcagacaagtataagtatacaaaacaagaccccacatggcagacgaaaaggagttcgctcctcgaccaaaccacagtagctccgaggagactacccagcgcccagctactcgcgcgcgacgcgtacctgcggcctctaccgatggacagcacatctcatccacccctaactcagggacccccacacgacgcagacgcgtcttcatcgtctccgaagaggagcagcagatgcactctggacgtcctgctgctcgcccctcgcgtgcagagcactccaactacgacggctcttactcctcctcggcagagcgctctcgctacgaagagcgctatcaggctgagcgtgccgatggccgctatagctacaactacaaccgctccgagcgcccccatcgctctgcagccccaggtcagcccggtgagggtcagcctcacaaggggaaatatgcaggcaaaggccccaagaagggcggtccatctgcagcgcctaaggcaaagaagaaaaagaagcagccacagctccccgtaccagtgaagtacgaggagatcgtcgatccatcacaggatctgcgtctcaataagttcctcgctaacgctggggtctgctcacgccgcgaggcggatgccctcatcgccgcaggtgagatcacggtaaatggcgtcgtagtcacggagctgggctcacgtgtgacccgtcttgacgaggtcgtatataagggtatgcgcgtctctactcagagcaaggtctatatccttcttaataagcctaagaactgtgtaaccacgagcgacgaccccgaatgccgtcgtacggtgatggatctcgtcaagggcgcttgcgaagagcgtatctatcctgtcggtcgtcttgaccgcaatactacgggcgtcatcctcatcacgaatgacggtgatctctccagtaagctcacgcacccctcctttatgaagaagaagatctaccacgcatggctggataagcccgtgtctgtggaggatatgcagcgcatcgctgagggtatcgagcttgaggatggtgagatccatgctgacgcactcagctacgtcagcgaagaggacctgagccaggtaggtatcgagatccactcgggtcgtaaccgtatcgtccgtcgtatcttcgagcacctgggctaccacgtcgtcaagctggaccgcgtctacttcgctggcctgacaaagaagaaccttccccgaggtcgctggcgctacctcaccgagcaggaggtcaacaacctgcgtatgggctccttcgagtaatagctatttgtcgacatctcacctcgcacacaccactcaatcatacatctatgaaacgtaccagaatcatcgagcttcttcagggctcactcgttggacagcaagtgaacgtcaagggctgggtccgtacccgccgtggcaataaggctattagcttcatcgcactgaatgacggctcgacgatccataatatccagatcgtcgttgatctcacgcgcttcgacgctgatctcctcgctaagatcactacgggggcaagcctcagcgtggtcggcgaactcgtcgcctctcaaggtcaggggcagagcgtagaaatacaagcaaacgaactcgaagtcctcgggacggcagatcctgctacctatcccctgcagaagaagggacactcgctggaattcctccgtgagatcgcccacctgcgtcctcgcacgaatacctttggggcgatctatcgtatgcgtcaccacatgtcgatcgctatccatacgttcttccatgagcgtggcttcttctatgtgcacacaccgctgatcacggcgagtgatgccgaaggtgctgggcagatgttccaggtcacgacactcgacttggacaacctcccacgtactgaagacggtcagatcgactataaggaagacttcttcgctcgtcatacgtcactcaccgtatcgggtcagctcgagggtgagatggccgcgctggcactcggtggtatctacaccttcgggccaacattccgtgcggagaactccaatacgcctcgtcacctcgcagagttctggatgatcgagcccgaagtagctttcctcgagattcaggagaatatggatctggcagaggagttcattaagtactgcgtgcagtgggctcttgatcactgtatggatgacctgacgttcctcgctgagcacttcgacaaggagctcatcgatcgtctgcgcttcgtactggataagcccttcaagcgtatgacctataccgagggtatcgagatcctcgaggcagcggtcaaggctggtcgtaagtttgagttccccatctattggggtgctgacctggcgagcgaacatgagcgctatctcgtagaagaacacttccagcgccccgtcatcgtcaccgactatcctaaggaaatcaagagcttctacatgaagctcaacgacgacggcaagaccgtccgcggtatggacgtcctcttccccaagatcggggagatcatcggtggctctgagcgtgaagctgattacgataagctcgtacagcgtgcacaggaggtaggtgtccccgagaaggacctctggtggtaccttgactcgcgtcgctatggtacggctcctcactcgggcttcggtctgggcttcgagcgcctgctgctcttcgttacgggtatggctaacatccgcgacgtcattcccttcccccgtacgccacgcaacgcagagttctaagtcgcgacggagtacctgctccttcgcaccatataccgaatcaagtcgggccgattcccttgggagccggcccgactgctatttggtcgggcgctgtgctatgaactaaagtccgcccccacatattatctctatgcgctgccgtcgtagcgcatccaaatatttaccccaatgaaagtcctcgttatctattcgcactcttatcacgacaccagccacgctgggaaggttatccttgacgtcttcaaggcacagcctgacttcgaggttcgtaatctcgaagagatctaccccaactgcgctccgatcgacatcgcccttgagcagcagcgcctggctgaggcggacgtcatcatcttccaccatcccatcttctggttcaatatgccggcaggccttaagcactatatggatgaagtcttccagtacgggttcgcctacggtagcacgggcgacaagctccgtgggaagaagttcattcactcctatacgaccggctctggcgcagcgaccttcgctggggagctgggcgaagtcctgcctgcagcgctcaaggcttcggctggcttctgcggtatggactatcagggtgccttcccactttatgggcagctggctctgacgaatccgaacgtgcctgccgaggcgaaggcgcacgctgagcgtgtcgtggaattcgttcgctcgctctaaggtctcagccttccttcccttcgaggaaagcctccagccgctccctcactgacgaagcccgtcagtgggggagcggcgctttgtgtaaggccacttgcggagtgagtaaagtctgggcgctttgcgaggaatatacctcgctgtcgtaaggaatatacctcgctgtcgtaaggaatatgcctcgccgtcgtgaggaatatacctcgctgtcgtgaggaatatacctcgccgtcgtgaggaatatacctcgctgtcgtgaggaatatacctcactgtcgaaaggtatataccatttgctcgaaaggtatataccatttgctcgaagggtatatactatttgctcgaagggtatatacctttcgtctaaaagctccttatgaggggaggggagtgaagccttttttccctgtctacacggggaaattcggggaatggcctcttattcggtatctttgcttaggcaagccccagacgtggggacacctttatccgcttagaattgatgcaaacagatacttatacgagtgcccatggggcctctgtcactcgctttgccgacgtggagatcctccgctatgagatcccaggcttcgaagccttgccactggagcgcaagctttttgtttaccatttaagtgaagctgcccttgctggccgcgatattaccttcgaccaaaatgggcgctatggcctgcgcttgcgtgcgctcttcgaaggcatctacctcggctacgaaggcgatcgtacgagtgtggacttccgtggcgtggaggaatatctcttccgcctgtggttctcctcaggcatccatcaccactacggctcggagaagttcgagccgcatttctctgaagcctatctccgcagctgcatcgaagagcttcagcgaagcaaaggacagctcctccgcttccgcggaagagagcttgacgagctccttgcggtggtcttcgaccccgagcgtgagccacgccgcacggtgcagagtggcgaaggcgacctcgtgcaagcttcttcggcgaacttctatgctcccgatgtcacgcaagccgaagccgaagccttctaccgtgcagcttatgactacctcaccgaagaggagcgccaagagcctccttctctggggctgaacagccgcttagcaaagactgaagacggtcagctctacgaagaagtctacaagcaggacggactctatggcgaggccttgagccagatcatcgcccacctcaaggccgctgcggcttatgctgagagcgaagcccagcgcaagaccattctttcgctcatcgaatactacaagaagggcgatctggaagagtacaactgctattccatccactgggtcggcgatacggagcctgtcgtggactttatcaatggcttcaccgaagtctatactgaccccctcgggatgaaggggatgtgggagtcgctcgtgcatatccgtgatgagaaggcgagcgaacgtacggcgaagatctgcagtgaggcagcgtggttcgaagcgcatgctcccatcgatgcccgcttcaagaaggagaatcctcgcggtgtatccgctacggtcgtctcggtagctatgctcgctggcgactcttatcccgctacgcccatcggtatcaacctgccgaacgctgactggatacgtgcgacctacggctcgaagtccgtcaccatcgacaatatccacgaagcctatcgcttggcagctcgtcacagcgggatggatgcagccttcgtccccgatcctgctacccgcgccctgcttgagaagtacgaaggggtgacggagcacctacataccgacctgcacgaatgcttgggtcacggctccggtaagctccttgacggcgtctcgcctgatgctctcggcgcttaccattcgacgctggaggaggcacgtgccgacctctttgccctatactatatggcagatgagcgtctcgtagagttggggctccttcctgatacggaggcgtacaaggcttgctactatcgctacctgctcaatgggcttatcacgcagcttgtacgtattcgcccagggcacgtcctcgaggaagcccacatgcgcaatcgtgctctcatcgctcgctacgtactggagcgtgctgctgcttcgggcgctgctgaacttcacggccttgagctcgtcatccacgactatgcagctcttcgccccatcgtcgccgaactactggccgaggtacagcgtatcaagagcgagggagatcagcctgcgggtcgcgccttagtggagcgctatgctatcgacgtagatcccgagcttcacgccgaggtactgcgtcgctacgctacgcttaatatcgccccctacaagggctttgtcaatcctcgccttgagctggtctacgatgccgaaggtggtatcaccgatgtccgtgcgacctataccgaaggctacgccgagcagatgcttcgctacagccgcgagtatgctacgctccccgaagacccaacgacagctgagcaggttcgtcaccccgagccctccgatgctacactggaggcagctaaggccctgcgtggaagtctgcgccatgctatggacgggcaggtcgcttcgtctatgcgctcgaaggggctttattacggcatcaactttggtcttacgctggactatatccttcgcctggcggagaagcagccgaagtcagccgatctggctcgctacatcctcagccgagatgtgcgtgagctgaagatcatcgggcagcttatctatcccgaggaggccgtgacgtacgaagtggctacgcaactggctctctcgtccttctctaacccagagctgcgcgactatctggcgaagcacttctttgaccgcatacccgaggctccttattgggcgcttgactggatctttactgagcatgcacagcgctgggaagatttgcttcccgtggcctttacgatcttagcacgctggctctcacagggcttccgcatcgagcatgaagcgcaccgcaagcgcttgctctcggaagtcctagagatcctctccgatagcgaagtacccttccccacgcctcttcagcgcacggctctgcttatgctcaagcgctggggacgctcggatgaggcgctacgtagcgaagtccttacctcgccgctcctcaaggcttgggccgagggagaagctcccgtgcagcgcgagttcgctgacgacctgacgtttgagttcgaagaatttatcactaacccatcataaccctttatgaagaccttcctcttagcctcggcttgcctgctgcttgcctcgggggcttcccttcccgcagtagcgagtagcactgtagcccttgcgagtgtcagtccggatagctcagcgcgctatcaagagcatgggacgaatgccagcctcattgggcgaggctttgaccaagcgctcttcacctttacgctccccgtggctgtcggctctacgctggagtccgtgacgattgatctcagtggcacctcacgaattaaggatgtccgtcagctgaagctttaccgcacgaagaacaaggatcgctttgaccaccgcacccctgggcagctcgtagcctctgcgcccgtcaagcgtgcttctcgcgtcaagctcgacctctctccacgtacgacgatctcgagcgatgatgccttctgggtcgtttgtgatatagccccttcggcacaggagggtggggaagtcgtctctcgccttagcgcgctgaagacgtcaagctatgagctctctacgctccccgatgcgaaggagcaccgccatggtatcgtcctgcagcgtagcttggtctgggcacctggcgaaggtggctcactgcactaccgtatccccggtgtcgtccgtctctcggatggtaccctcgtggcaagcattgatcgtcgcaagaagaatgtcaatgacctgccaggtgatatcgacgtggagatcaagcgctcgatagatgatggtaagacttggagtgcgcctatcacggtggctcgtggtacgtcggagcatggctacggcgacgctgctatggctaccgacggacgtacgatctacatggtgatggtcggtggcgctggtctttggcattatccttcgcatgccacgcatcctatccagatgtacttcactaagagcacagatggtggccgcacatgggagcctgtgaccaatatcacgaagtctatctaccgtgatcgcttcgagtacggtggcttcttcgcttcgggcaacgggatcatgacctccacgggccgcatcatcttcgtcgcagctatccgcacggaggaggcttggggcggacgtgctgataacgtcctggcttactctgatgaccaggggaagacatggcagatctccgagaccgctcgcgtcaatggcgacgagtcgaagatcgtcgagctctccgacggctcgctgctggtctcctgccgcaatcgtgctggtggcctgaatgcgcgtacctacgtgcactccagcgacggtggcaagacgtggtctgagcccaagcagtggtctgagctgatgggtaatgcttgtaatggtggcttcgcccgctacgcacccgtcggtagcaagaagaatgaaaacctccttctgcacacccttcccgccagcgccacgcgtgaccacctgaagatcttcctcagcgaagacgagggtaagacctggccttattcgcgtgagatctgccgtggcgagtcggtctatagcgaactggtgatcttccccgacgggacgattgggatcatcagcgaagaggacgacaaccccggattcgacatctacttcacgcgtgtaagccttgactggatccgcaagggcaatgctccccgcaagaagtagcgcctcccaggcataggcactcacgaaagctcctttgctctcgcaaatgggcttagaattaaagggctgacttcgcacctgcgaagtcagcccttctcaaatatacacccaaaagaatgcccatatatagggcggaaaaacttccgtatatgcgccactaaacttccgtatatgcgaaaataaatttctgcatatacgaaaaaatatttccgtatatacggaaatttccctccgtatatatgccgtggaatgcccgcatatatggcgtgatatttcctcggtatttgcatagtaaagcgccccgtctgcaggtctttctgcgggcggggcgccttggcttttagggaatagggcgactacttgcggtagcgcttcgtaaggtcttcaaagtaatcgatgcgtcggtcgcgcaggaagggccaccagcggcgtaccgattcgcttcgcgtgaggttgacttcgatgatctggatcgcttcttcttgccccagctcgcagagcaattccccctgcgggccagcgacgaagctacgaccccagaaacggatacccttggtctgacccgatgggtcttcttcgtggcccacacggttcaccgtgatcacggggaggccattggctacggcgtgaccgcgctggacgagctgccaggcatcgctctgacgactctgctcttcgacgacgtcgctactttcgtagccgatagccgtggggtagatgagcatctcggctcctgcgagtgccatgaggcgggctgcttcgggataccactggtcccagcagacgagtatgccgagtgtcccgacagaggtctcgatgggctcgaagcccagatccccaggggtgaagtagaacttctcgtagtaggcggggtcatcggggatgtgcatcttgcgatacttcccagcgatggagccgtcgtgctccaagaccacggaggtattgtggtacaggcctgcggcacgacgctcaaagagcgagaggactaagacgatccccagctcggcagccagcgcgccgaactcctccgtgcttggcccagggatgggctcggcttggtcgaagacgttgacgtcctccgtctggcagaagtaaaggccgttgtgaagctcttgcagtacgaccagctctgcgccttgggctgctgccgagcgaattgcttccttcagacggcgcttgttgtcggagtggtcggcggtgttggcctgctgaatgaggccgacgcgaagtattctcttttcggacataggtcttatctccacttattcttgttgatgaagccacgggggaactgcatcgtggcgcagtgtaggctaccatgctggtagatgagggcgcggctgggcacggcgacgatctcgcgattaggtacagcagccttcaggcgctcgagtgctacggcatcggtctcgacgtcgtaggtgggcacgaggagcgcaccattgacgaagaggaagttggcatacgtggcgggcatgcgctcgccttcctcatcatgcagtgcaggaggcaggggcagagggataagcttgtaaggagtaccatccttcgtgcgcagtgcttcgagttcctttttcatgcgctccagctcgtgatagtggctatccttaggatcttcgcagctgacgtaggcgatggtcgttggggtgaggaagcgagcgagcgtgtcgatatgcccgtcggtatcgtcgccctcgatctggccgttggtgagcgtaaggagacgctcacccccaaggatctcaatgaggtactgacggagcgcttcgtcattgacgcccgcattgcggttgggctcgacgattacgctctcagtcgagagtagcgtcccagcgccatcgctttcgataccgccgccttcgaagacaaggctaagggcattggtatatgccgtctcagggacaaaggcacgcgagagatagagggcacgcgtaatcaagttgtccttgtcggctgcgaacttcattccccagccgttgaaggtgaagtccacgatcatggggcgctcgttgccctcttcgtccgtgagtaagagtgagaggggagcatagtcgcggcaccaggtatcattgcagtccatctccatgatgaagagctcgtgcttgtgctcgcggtcagagaggaggccgcgcacgtgctcgggatccttggcgaggatgaggaggtcttcgtaggcgaggatgctttcagccatctgcttgtagcaagcttctatttggggcaagcgcgaagcccagtccatggtctcattgggccaagagatcaggacgagatcttgctccacccactcggggaggaaagttaggcgtggggtcatagggatacttattaggattgtagggatagaagctgtgctcggagctcttcccagagctcggggacagctgtctcagcgctgcggtcttctccactgagtgcggcttcacgtagctcggtcgcagccaagtccatttgtggagcttcggggtggagatgtagcatcgcttcggggagggctgcagggtcaatgtcctccagcggatagcctgggcgaggatagacatgcagggggataatcctcaagagtcgctggtagtcataccagcggtctatgaggcggagattgtcactcccgataaggagcgagaagtcatattcgggatagaggaggcatagcgctcttatgctccgcactgtatagtggggtagcggcagtagctcctccagcgtgatcagtcgtaggcgtggctcaccttggatggcacggcgtatatagtctgctcgccaagcgaaggggagctgtgttgcacggtccttgaggggattgagcgggctcagcacaagccatacttcatcgcacggcaggctgtccagtgcaaactgtgccagatgtaggtgggcacgatgcagtggattgaaagagccaaagtaaaggcagacgcgtctccgtgagctaatcacaggtactatatctgtacggggagcccaagggtacgctgagcgagctcgatctcctcgggctcaccagtgtgcttaccatcgacgtcgctgagcttgacgcagggattccagcgctccttctctgtcatcttacacttccagagcttcatgacgatgttcatagggcgcacaccattgccgacgtcattggagaagttcgtgccgataccgaagctggcaccgatacgacccttacaatagttggcgatctcgatagcgcgctcaggatcgagaccatcggagaagatgatgtacttgatggtggggtctacgcgcagctcacggtagcgagcgatgactttctccgtgaactggaggggatccccgctgtcgtggcgcaggctggtgaagagcatggcgtgcttcttactgaagttgcgcatgaagacatccgtcgtgtaggtatctgtaagtaccgtaccgaggtctccgtcgtagacattgatccagtcttccatagccatgtagttagccatcttgtagccgaacatagcgccgtggaactgaatccactcgtggggatgtgtccccgatacacgcaggccatgcttgtaagcatagtagacgttgctcgtgccgaaaaggtagccagcagcgtgctccttgagaagctccgtcacgcggtcttcgatagcagcactgaagcgacgacgcataccgaacattgagaacgtgatgccgtgctcagcgagcttacgagccttgctgatgatcgtgcgctcggtgtactccatgtcaggctgagcaccgagtatcttatagtagagctcgctcacgagagcaaggataggcgtctcccaaagcgtgacgcgatagagcaggccttcggcgatgatagacaggtgcccctcagtatcctgctccacctttacttcctcggggtcgaagcggaagcctcgtacaaagtcaatgtacgtcggggggaggtaggggagttcgcgatataggaagctcgcctcgtccttagtcagggcgagcttagacatctcttggatctctttctttagctcttcggcaaagccctgagggtaggtcgtcttcccccggtcaatgaagcggaactgcccataggctcgaggatagagcttggagtaggcgtagctcgtggtgaacttatagaggtctgtatctaatacgctttggatgatagccatgatgtggtagtattatttgtgactatgttgtgctcgcaaagataaggatatatagtgtcactaccttatcagatataggcagatacataaaagccccacccctacggctctgtgccttgatggggtggggcttatattataaggtatagggagatcgggcttacttgatcttcttgaggctttcgaagccttcgccatagacgccctttacagctccattggagacgaaggccttggggtcaatctcttcgatgatgcgcgagatagctacagactgctgcttgcgcactacgacgaggaggaccttctgtggctggcccgtgtagccccctgtagcttcgagcagggtacagccacgacgcagacgagaggtgatcgcatcattgatctcttgatacttcgagctgaagatcatgaactgcaccgactggcggttgccactcgtgtaccagtccatcgtcatcgccaggagtacgacttcgatgaaggacatgacgagcttgtcaaaggccaccagcgggtcgatcttgatgtctgccagatagacgttggcaaagtaagagaagagtaccactgtaccgtccactgcgacgaagatgcgcccgaaggacatattgcggtacttgctgatgagtgcgacgatgacatccgtccccccagagctaccattcacagagaagatgagccccagcccgagaccacacatcatggacccgaggatgagagcaagcagaggctgatccttgaggaccatcagatgccacagctcttcgacacgtgggtcggggatagcggtacgcgtagcgatgggcacgagcacagcaaggagaccaatcccgatgagggtcttgatgaagaagttcttatccaggaagaggaaggcgatgacaaggaggctgatgttgatgatgttgtacgggatgtcgaccttgatccctgtgatgatcgtgatgatgttacagatccccatgagcccccccgtggtgacacgctgcggatagatgaggaagctgaagcctacggtgtagaggagtacacccatcagcacgatcaggaggtctttccagaagtacttggagaccgcttgatgagagagttcatggaagagatccttgaacttctggccgaggaacgtcagcagattgagattctgtgccattgctacttgttagtgaggttggtagaggttaagctattgtgattactataatacgatgttgatgatgcggccggggacgatgatgaccttcttaggagtcttgccctcgagccacttctgtgcttcgtcagctgaaagtacggcctcgcggatctcatcctgagacgcttcacgtggcaactcgatggtgaagcgtgtcttcccattgaagctcacggggtacttgaagctatcctcgacgaggagcttctcatcgtactcgggccactgggcagcgacgatggtcgtctcttcaccgatggcatgccagagctcttcggcgatgtgaggagcgaagggggcgaggaggatgaggagaggctggagtacttcgcgagaagcggtcttcagaccctgcagctcgttgatacagatcatgaaggcagctacggaggtgttgaaggagaactgctcgacgtcctgcgtcaccttgcggatcagcttgtgcaggctcttgagttcttccttggtagcgggagtgtcagtgacacgtaggccgtcggtagagtagtacagcccccacagcttgcggaggaagcggtgtacgccgtcgataccattggtgtcccagggcttactctgctcaagaggaccaaggaacatctcatacagacggagcgtgtcggcaccatagcgctcgacgatcatatcggggttgacgacattgtacatcgacttgctcatcttctcgacggcccatccgcagatgtacttgccatcctcgaggatgaagtcagccgtagcgtactcggggcgccaagcacggaaggcttcgagatcgagctggtcgttgtagacgatattcacatccacgtggatgggggtcgtgtcgtactgatccttgaggccgagggagacgaaggtattcgtgtccttgatgcggtagacgaagttggagcgcccctggatcatcccctgattgaccagcttacggaagggctcgtcttcgacgacgaggccgaggtcatagacgaacttattccagaagcggctatagatgaggtgaccggtagcatgctctgcacctccgacgtagaggtctacatggcgccagtaggcattcttgtcacgaccgacaagtgccttgtcattgtgcggatccatgtagcggaggtaataggccgagctaccagcgaagcccggcattgtgcttagctcgtaggggaagccttcggcggtgtgccaccccttagcacgaccaagagggggctgaccatcggaggtagggaggaacttatctacctcggggaggcagaggggcagttcatcttcgctgatggtatgggctatcccctcggcatcataatagatggggaagggctcaccccagtagcgctgacggctgaagatcgcgtcgcgtagacgatagttcgtcttgatctgtcccagcccttcgctcgtgacgtgtgccttcatcttggcgatggcatccgtgacggagagaccagtgatgatacctgagttgatgagtacaccgctcttgctatccttggattcctcccaagtcgcaggatcggtagcttcttcaccttcggggacgacaacctgaatgataggcaggccgaagtgacgagcaaaggcaaagtcacggctgtcgtgagcggggacagccattacggctcccgtcccatagccagctaagacatagtcactgatccagatggggatcgcttcgcctgtcagcggattagtagcataggagccagagaagaccccagagacacgacggtcagagagacgatcgcgctcagtgcggcggcgagtggctgccaggtattcgtctacggcagcctgctgctcggcggtagtgactatgggtacatagtcactctcgggggctaagaccataaaggtaaccccatagatcgtatcgacacgcgtagtgaagacggtgagctctgctccatcgccacccacgagagggaagcgaacctctgcaccttcgctcttaccgatccagttgcgctgtgattccttgagggattcactccatttgaggtcgttgaggctgtcgagtaggcggccagcataggccgagacgcgcagacaccactgctgcatcttcttctgctctacgggatggcctccgcgttcgctcactccatcatggacttcgtcgttggccagtacggtgccgagagcagcacaccagttgaccatcgtctcaccgaggtaggccagacgatagttcatcagggtctgcatctgcttcttcttatcccagctacgccattcttcggcggtgaaggagagtgcttcgctttcggctacatcgatccccttagtcccttcggcctcgaagtgggcgatgagctcggagataggtgcagccttgcctgtagcattattataataggagtggaagagctggatgaagacccactgcgtccacttatagtattcgggatcggaggtgcgtacctcgcgcgaccagtcaaagctgaagccaatctgatccagctgttcgcgatagcgacggatgttctccgtagtcgttacctcagggtgctgccctgtctggatagcatactgctcagcgggaagcccgaaggcatcgtaacccatgggatggagtacattgaagccacgaagtcgcttgtagcgggcgaagatatccgaggcgatatagcctaatgggtgaccgacatgcaggcctgctcccgaggggtaggggaacatgtccaggacgtaataaggggggcggctgggatcttccgtgacacgatatacgtcttctgctcgccagtacgcttgccagcgtgcttcgatagctctaaagttatattccatctataggtagttgacttgtctttaatgaacacgcaaaggtacgttatttgcttcaaaatgttgcgactgcacccccgtttttaatgccctcactctcttttcttaccgaaggttttctcacacgagtgaaggatgtcttgtgaatggtctatgcctatggttggggggccttctatcatatcgtgatatgggggtgcaaagctccatcggattgttggaatagaagaggtgatgaaatgactgttttatcactgtacatctgtgcttttcctcgatgttgaagatgagagagttcggaggggtactacgtgcctgtattggtcgctgggtgaacctaagagacacacaagcccctcgatttatcgcgcgtattcatcttatacagcggagggaaaagtgtccttcttgcgaagaaaaaagcaccctctcgtagtgcatttcctctgtctacgcacgtggtcttaaagaccaggtacataaattcaaatatccacgtacgtagatattagagccacgtacgtagcccaaacttatctgctactcgtccacaatttttctccctacacggagcaacaacctaatataggtcacttcacaaagctatataggaatcgatccaaagctatatagctttcttcgctatcctatataggctcacccagcgaccaatataggttcatacggatccccgcgtaatcggtgaaataagcctcctactaacttgagacaacctgccgccatcaatgtgctattgaccatgagggacttctatggtcttggagggaaagtcctagctagtgagctaattcccccttttctgtaactttgcgtgaaggattgtgccgtagtgaaagtcgctactgtacgcttttattaaaggagactaacgaatgcaagcactgaagatcgtactcatcggctacggcaagatggggcacgtcatagaagaaatagcccgtgcacgagggcatgagatcgtgctgactattgaccgcgacgaggagcacctcttcgatgatccccgcttcgctgcggctgatgtcgctattgagttcactgctcccgcaatggcttatgacaattgtcgccgagctatcgaccgcggggtacccgtagtctctggtacaacggggtgggcggataagttgcccgagctgcgtgagcgctgtgaggcgggtgaggggacgctcttttggtcctccaactacagcatcggcgtccagctcttcctacagatcaatcgccgtgtagctgagctcatgcaggctgctcctggttatcgcctaagcctcgatgagacgcaccatatccataagcttgatgcccccagtggcacggcgatcacgctggctgagactatcctcgctggacgtcccgagctccatggatgggagctgacggataagcccgagccaggtgtcctgcctatcatcgcacatcgtgagggcgaagtcccagggatacatactgtgacctatacctcagaggtcgatcgtatcgtcctgactcatgaggcatttggtcgtcagggctttgctcttggggcggtattggcagctgaatacgcctacacgcaccgcggttggctgacgatggatgacctccttcagcttcgctaagtagtcactactctcccgatgcatatacaccataattatatatagagcaccgaatgaaatcgcatccgatagcaggccttactccgggacagcgcacatggcgccatatcaagggcgggattctgattcttcttcttatcgcctttgcttgctgggcaagctggtggtggctgattctcctgcccctcctcatcgacttctactttacgcgatggatcaactggcgttatctgcgtgagcaccccaaccccaccgtgcgcctccttggcggtctggtcgaggatatcatcttcgtggtcttcgccgtgtcgattatcttcacctacttcttccagaactttgccatcccctcctcctcgctggagaagacgcttctcatcggtgattatctcttcgtcaataagctgagctatggccctcgtgtgccgatgacccccgtggccttccccttagcgcacaataccattctcgggcataagtcctacctcgatgagccttcgctcccttatcgccgcctcaagggcttcgggaaggtcgagcgtaatgaccttgtcgtctttaacttccccgcaggggatacggtggcactcaatatgccgaaccctgactactacacgctatgtgctacttatggtcgcgatgccgtgtggagtgatcgagctcagttcggtgagattgtctaccgccccgtagatcgtcgtgatcactatgtcaagcgctgtatcggtctccctggagagcgctttgagatccgtaataagcaggtctatatcgatggtaaggctattgccaaccccgagaagatgcagtacaactacttcctccagacggatggtagagctctgcctcaggagatcttagatgatctcgagatcaacgaccgtgatgtgcagctgatctacgaccagcgtacctatcagccttcctctgagacggggactattgagggctacctgcgctatgcggggctttccttccagcccaccgatgcggaggggcactatggcgctatctactacctccccctgacggaggagatgaagactcgtctcaaggctgaaccttatgtccgcgctatcgctgtcgacatagcccagcctcagaactcgacgggtgtatatcctgtggacttcaagacgccttggacgaaggacaactatgggccgctcctcattccacgccgtgggctgaagatcgtccttaacgctacggctgtggcactctaccatcgctgtatccgcaactacgaagggcaccgcctcgaggtgcagcctgacgggacggtactcattgacgggaagcccagtacgacctacaccttccagcaggactactacttcatgctcggagacaatcgcgatatgtcggccgacagccgctactggggcttcgttcccgaagaccatatcgtaggtaagcctgccttcctctggctctcgatcaatagcgagcgcccgctgacgaatggtggtatccgctggtcacggatgatgcgtctgattcatgataagtaaggatcagatcgtcagctcatccttcgtacgctacggagcactaccgctggggcttattgccctggtggtagtgctccgtatattcttcttcacaccctttcgtgtgatgacgaccgcccaggcgcctgccttgcgccttggagcatgggcattggctcgtcgcacgcagagccccgatcgaggctcactcatcctctttcatacggagagagcgggcacctctacctcagctcagagtctgatggtggcccgtgtggtcgccctgcctggagatagccttgaggtgcgctctggccagctctttgtcaatggtgttgcagtgtctgactaccgccatccgcgagatgctcgagagcagtatgcactacgcttaccccgtgagggcggcgtctaccccttgacctccaccaatcttgttgcctatcgtgccgccctcgtcgaggagcagcgactctttgctcctgcgcgtggtgaggttgctctgcacagactggctcctaaggattggctcactgcactcgcttccaacccttatcataccttccgtcgggattactactgggtactcaccgacgatacgagcgtagcgcctgactcccgccatctgggtatcctccctgcggatgctatcgaaggcgttatcctctttgccctatgatggagagcctacccacgctactcctcgctacggcctacgcgccacctgtcagctatttcgtgaagctctatgagcatgtagctggcactatagcactcgaggggtgcgagcactacatcaagcagagctatcgtaatcgctgccgtatccttggtccgaatggcgtgcagtccctcacgataccagtcgagcttcccgctgggacgaagactccgatacgtgaggtgcgtatctcggatcatggggagtggcgccacctgcatgcgcaggcactgcgcacggcttatggggcaagtccgttcttcgagttctatgcagatgagctgatgcccttctatgagcgacgctatacttatctgtgggacttcaatgcagagctgctgcagacgctcctcgctcagctacagcttgacctcgactggagtatgactacgggcttccttccccctcagtcgtctgaggctacatccgagtgctgcgaccttcgctatacgctgagtccgaagctggtagctccagtacctggagttcagctacgcccatattaccagctacatctggagcacatgggctttgtagaagatctgagtatcctcgatcttctctttgagatggggcccgaagccttacttgtcctgcgggatagcctgcaagcttagctcttttatttacccaatttcctatcacttattgctatccaacagatggatttgactcaatcatccctgcctacacttacccccccatgtgctgaggtccaagacgaatacttaacccatttggggagcgaacgtattgatcccttctactatatgcgggataaagacgatccgcgtgtgcttgagtacctccgtgcagagaatgcctatacctctgaggtcatggcctcgatgcatgagacagaggagcagatatttaaggagatcgtagggcgaattaaggaggatgatcagagttatccgacgctgcgccgtggctactattactatgcccgcactgagaaggggaagcaatacccttcgtattaccgcgtctctgaggctgactttgtagagcgctatgggcagtgtcctacggcgatcgagggtggggaactactcttcgatgtcaatgcccttgccgaaggacatgatgcatacatctttgcgggctatgcggtgagtcccgataataagcttgctgcctactttgccaatacgacgggctcgtatgcggagtttgatctccatatacgtgacctcgagcgtggcgaagaccttgccttcacgctctcgggcgtttcgtcactggcttgggcggaggacagcgagacgatctactataccttgattgatgagacccttcgctcgacgaaggcttttgcccagcgccttacggatgccgagcctacgctcatctacgaagagcaggacgtccgcttctcctgcagtgtgagtgagacgaagacccgtgagtacatcttcttgacggcagggagtagcacaacgaccgaggaatactacctcacctcggacggatcggatcgtacgccaaagctcttccttccccgtgagcaagatgtgcgctactctatacttagtcaccgtgagaagttcttcatctactataaggataaggcatctctcaatggtatggtctacgtcaccgataaggataaggtgcaagatcgtagcgcttggaagctcttcgtccctcaccgcacggaggtacgcctcgatagtatcggtgtctatgcttcccacgtcgcactggaggagcgtcaagatggtctcactcagattcgtatcctctctatcgaaggggagtcgtgcggatcgattcacttccctgagcctgtctataccatcagcctcaaggggaattccacctacgaggctacgacgatacgctatagctactcatccccaaatcgtcccgcttcactctacgaatatgatatggagcagcgggagagtcgtctcctcaagcagcaggaggtcggtggaggctttagccccgaggactataccgtagagcgcctttgggctacagcccccgatggtgtccgtgtgccgatgacgctgctctatcggaagggactgcggcgtgatggctcggcccccgccttgctctatggctatgggagctatggagtgacgctcgatgcacacttcagcgtctcggtcttgagccttgttgaccgcggtttcatctacgcacaggctcaagtgcgtgggggaagtgacctcggggaacagtggtatgaagacgggaagttcctcaagaagaagaacaccttcaccgacttcatcgcttgtgcagagaccctcatcgctgaaggctatacctctcctgagcgcttgatggccgaaggggggagtgccggcggtctgctgataggtgctgtggcgaatagtcgtcccgacctcttccatacgatgatcgcagctgtacctttcgttgatgtcgcgacgacgatgcttgatgagtccctcccgctcactacaggagagtacgaagagtgggggaatcccaatgaccctgagtacttcgactatatgctcagctattcgccctatgacaacatctcggcacagagctatccgcatctcttggtaacaggcgggctcaatgactcgcaggtactcttccatgagcccacgaagtatgtagcgaagctccgccgtcacaagatggatgaccacctccttctattgaagatgaatatggattcggggcatggtggagccacggggcgctatgatggtatccgagataccgcctttgagtacgccttcctcttattgacgctcggtatgaagtaatccttcatctttggatagagctataccgtaatatatatagggtgggggacgtatacgatagttatcctcatctccctcccaatgttaccagcagtggatcgtaatgcgcctccctaatcggatgctcttacgactcactgctgggtgcttttagccccccagccaagaggcctatgtagcagattttcacgaagggatactgctgcatagagtcctgccctctatttattctgctaaggcatcgcacgcccagctcaccgatatgcctctccgaagtgatacgcaagcccttcgccttaccgcgagtattcctcttatccagcggagggaaaattgtccttctcgtgaagaaaaaagtaccctcccgtagtcgtttttctctgtctacgcacgtagtcttaaagaccaggcacgcaaatcccaatatccacgtacggagatattaggaccacatacgtagtccaaacttttctgccactcgtccacaacttttatccctacgcggagcaacaacctaataataggtcacttcacaaagctatatagcattcttcgccatcctatatagctctaccccacgcatccatatacctattgagaccattgcgcaagcccacctcttcattactcgtaccttcttccctcggaaatcggaggctttaggctgagaagttcgaaggaggaaagtgtaagatgtgaagagatggccttgtgcaatggtcttgaaggggaatatcgaccagtactacttcgtttgatggggggactaatcagttgattgatagtgcgtcgcaagagtagcttggtgctcggtggtttgatgggatttgggtgggttgatatggggctagaggaggggcttgtaggggatgatccgccttatttaatgggcctaatctgtgaatatttaagaggttgccgtagagttagggaatgaaggcgattattgttacatttgcagtacagaagttacggggtagaggaccgtcctcctgccctaatcatatcaactcaaagcaagatagaaaagctatgaacctctcacacatcgagcatcttggcatcgccgtaaagagtatcgaagcatctctgccttattatgaaggcatcctcggtctgaagtgctacaacatcgaagaagtagcagaccagaaggttaagacggccttcttcaaggtcggtcagacgaagatcgaactgctcgaagctacctctcccgaaagcaccatcgcaaagttcatcgagaagcgtggggaaggtatccaccacatcgctttcgctgtgcctaacgctgacgaagcgctgcaggagctcgctgataagggcgtccagctgatcgacaagcagtctcgtaagggggctgaaggtctgaacatcggcttcctccaccccaagagcacaattggtgtcctcaccgagctgtgtgaccacagagacgtcaagtaattgaccgaagaatgggataatagaagagtccagagcggaagtccgcttacgtgatctcctctattatcccattctaataatctctctatcctaaataacgacagtatctactaacagcaatcaatatgagtgtccaattagagaaaatcaaggagcttattgagctccgcgctaaggcccacatcggtggcggtcagaagcgtatcgacagccagcaccagaagggtaagttcaccgctcgcgagcgtatcgccctcctcctcgacgaaggtagcttcgacgaaatcgacaccttcgtcctgcaccgctcgacgaacttcggtatcgacaagacgaagttcctcggtgacggtgtcgtcaccggggccggtacgatcgacggtcgtctggtctatgtctttgcacaggacttcaccgtcttcggtggtgcactctccgaaatgctggcttcgaagatctgtaaggtcatggagctcgctatgaagatgggtgctcctgtcatcggccttaacgactcgggtggtgcccgtattcaggaaggtatcaatgctctcagcggctatggtgacatcttccagaacaacatcctggcttcgggtgtgatcccccagatctctgctatcttcggtccttgcgccggtggtgccgtttactcacctgctcttactgacttcaacatcatgagcaagggtacgagctacatgttcctcacgggccccaaggtcgtcaagaccgtcacgggtgaagacgttacccaggagcagctcggtggtgccagcgtacacgcctccaagagtggtgtcgctcacttcgctgtagacaatgaagaggaaggtatccgcctgatccgtcacctgctctccttcatcccccagaacaatatggaggatgctccttgcgtagagcctacggacgtagtagaccgtgtcgacgatgtcctcaacacgatcatccctgaccagcctaacaagggctacaacatgtacgatgtcatcggtacgatcgtcgacaatggtgagttcctcgaagtacaccgtgactgggctaagaacatcatcatcggcttcgctcgcttcaatggtcagagcgtcggtatcgtcgctaaccagcctatggtcatggcgggtgcccttgacagcaatgcttctcgtaaggctgctcgcttcgtccgcttctgtgacgccttcaacatccctctcgtcaccctcgtagacgtcccaggcttcctcccaggtacagggcaggaatacaacggggttatcgtccatggtgctaagctcctctacgccttcggtgaagctacggtgcccaagatcaccatcacgctgcgtaaggcttatggtggtgcctacatcgtgatgagctctaagcacctgcgctccgacatcaacctcgcatggccttcagctgaaatcgctgttatgggccccacgggtgctgtcgaagtaatcttcgctaaggaggtagctgctgcagaagatcctgcacaggctgctgctgagaaggaagaagaataccgcaaggccttcgccaacccatacaacgccgcttcttacggctatatggatgacgtcatcgagcctcgcaacacacgcttccgtatcatccgcgctcttgagcagctccgcaccaagaagcagatcaatcctgcgaagaagcacgacaacctgcctctctaagcaggcttgtcttggccattcatagtccatcaagctacacgctatgaatctcgctcgcaaactataccagctaaccctcgggctgtcgcttgcggcagtaccgatggtggcatgggctcaagaccatcctcagctctccgagaaagtccaaagactcgccgagcgcgaccctgctggaggtatcatgaccttcacggctgtgctcgtcgtcttcctcgcgctgctgatgctggtgcttatcttccgatggatcgggatattcttccagaggagaaatgctccgaaggtagagaaacccgctactcagaaggcgcccgcagcgagctctacaggtaagccctccgctgaagctctggtagccatctcactggctctccagagtgccgcggggaagcctgatgaagtcgccgccgttatcgcgatggctcttcgctctgagctcgagacgcagcacgatcacgaaagctacgtcctgacgatacgccaccgtcccacgatgtggaacgcgcatgtccgacagactccggccctcaaacgataaacaagctatcctcacaagaaatatgtcgcaggaacccaatctcaaggaagtcttcgtcgccatctcctatgcgctgcacgaagagctgggtaagcacctccacgaccaagagtctctggtgctcacctacaagcgtacggctccatctccctgggcctccaaggctctgacgatgcgccagcttcctatcctcacgcaactataataagcaatcacattcaactccctatccacaatgaaagagtacaagtataagatcaatggcaacgagtacagtgtcgctatcatcgatctcgaaggcgacaaggctgccgtagaagtaaatggtgtctcctaccaggtagatatcctcaccgaaggctacaccgcacctgctccacgtccagcagctaagcctgctgtggctcccgcacctgctcctgccgcagcacccgccgctcctgcacccgctcctcagcctatcgcccccgctgctcctgctgccgaacccgcagctcccgcaggtaagggtacggctgtccagtctcctctgcccggtgtcatcctcgacatcaaggtcgctgtaggcgatcaggtaaaggctggtcagacggtggctatcctcgaggctatgaagatggagaacaacatcaacgctgagtgcgatggtgtcatcactgccatcaaggtctctaagggggataacatcctcgaaggctctgatatcgtaatcatcggatagtcttatgtcctccttctggggcttcttagctgagaatctggagaccttctactcctttacgggggtagctaatgccactcctgggcacctgatcatgatcctggtcggtctgctcttcatcttcttagctatcagatatgagtttgagccaatgctgctcatccctattggcttcggtatgctcatcgggaacatacctatgctcaacgggctgcaggtcggtatctatgaacaaggctctgtactgaacatcctataccaaggggtgcgccaagggtggtacccgcccttgatcttcctcgggatcggtgcgatgacagacttcacggctcttatctctaaccccaagctcatgctcgtcggagcggctgcacagttcggtatctttgcagcttatatgacggctctacagctgggctttacgccaactgaagcaggggctattggtatcatcggtggagcagatggcccgacggctatcttcctctcgaaccgcttggctcctcatctcctcggtgctatcgccgtgtcggcttactcctacatggctctggtgcccgtgatccagcctcccttcatgcgtcttctgacgacgaagaaggagcgtgtaatgcgcatgaagcgtcctcgtcaggtctctcagacggagaagatcatcttccctatcgctggacttctcttgacgacgatgctcgtaccgcctgcactgcccctcttagggatgctcttctttggtaatctccttcgcgagagtggtgtcacgaagcgtcttgctgacacagctaaggggccgctgatcgatacgatcacgatcctcctcggtgtcacggtaggtgcttcgacccaggccacggaattcctcacgggtaactcagtattgatcttcggactcggggcattctccttcgtcgtagctacggtgagcgggatcctcttcgtcaagttcttcaacgtcttcctcaagccagagaacaagatcaatcctctcatcgggaatgctggtgtctctgctgtgcctgactccgcacgtatctctcagacgcttggtctggaatacgaccctacgaactacctccttatgcacgccatggggcctaacgtcgccggggttattgggtcagctgtcgcagctggtatcctcctgagcttccttggctaagggatcaccgacacactacacactgctataggccttcgcgctccagatctcccttgggggatgtggggcgcgaagctactttatatgtataatccgcaaaacgaagcgtgcggcacatcgcaaacgaagcgtacacccccacacaccgctgagaagaaacgaagcgtcacattttcggggaatataccaagggcgttcggcaaccatccgaacgcccttcttgcatcagtcaaatagggtcggctcctcctccttgacatagttgcacaccatccattcttcctgcttgcgtcgggaggtcttagaggcggagatcgtgcgctcgatacgatggatgtgccacccgtgcaccgtagcatatcgctcgatattatcatcagggaacatagttagcatgaacttacccttgacctctgtaaggaggtcaaggagagccagcaggtggctctcgccgaacacgccctcgtaatgcccgcagtcactccccacatagggaggatcgacgaagtggaaggtgtcgggcgtatcatagcatcggattacctcgagggcatccctattctcaatcgtgacattatccagacggcgggcgaggtgctcaccgaactcctccttggcgttgcggagctttttgggcatccctcctccgaagtcgtatccaaaagtcccatcgagcatgctggcaaagctcatcttagagagtgcccagacggcccacgctcgatccatacgagtgaagaactgcgggtactccaagatgtgggctgcgtgtgcgtggatatccctcgagtgcactgtgacatcaacacgggccttcaggaggtcatactccgtcttgagcatctcgtagaagttggtcatctgctggttgaggtcgttgatcacctccccatcagaagggtctttagcgaagaagacagccgcgccaccacagaaggactctgtatagagggtgtgcgaagggattagaggcaggatatgcttgagcatcgtctgcttaccgccataataggtaataggggttctcatttaggataaatcgttgtatttttgcggtctctcacccacactacataatagcaatgcgccgatacgaaaggaaaggcattaagccctcgacctttgcgtatcggcgcatatttgtaagtgtgaggtgagagtccacttacgaaggtcgggggctttcttataccccgaccagggaagaagttacttgtagttgaattggctcttgccgaagaggcgaacagccttgtagtagaggtaggagaggacgatgaaccacgtctgtgatcccgccttgcgacccttgaaatagtcgatagaccgccctaccatatcctgaaagaggacgaagtccgcttgctgtctatcctgctccgttcccccaatgttatagcgaacatcgtgctgaacgcactccttctggaagaactcgtagtgcggaggcttaagccagcgaagaaagcctgagcaggctccgcatccgttaaccttgttatctgtggccatagtctattagctgaactccgcggagaacgcggaggtgaatatgcgtactgaaagcgtcgatattgcgcccgcggtagcaggctccaggcgatgcgtgagggcatatcgctccatcgtacgatcgtaggtctttggcggaactggatacacagatcccgccttttgaggtccagtcatcgacacgccagcagatcgagccatatcaatgcccgcctcccaggaccctttcgttgccacggcgacatcccacagggtctgcccaggtagcgtcgtcacatccatcgtttacgtatcttgaggatgaagatgatgacagcgatgatgacagcggtgcagccgagtactcgtagcgtagagttgatatcggcgattgcactggtctttttcacctgcgtctccacatacacactgtctaccttttgtaaataaatggtgtcgtgctgcgttcgatcgcggatgcgtgtacgccaccgctccaggtagacagtatcccccttggagtggatgtacacgctgtcatgcacatagatgctatcacgttgcacgctgcttcgttcgctccactccacgcgacgctcacccttgactacggcagtctttgtcgttccgcaagatgaaagcgatacgaggatcagcgaccaaaagaggatgagcgcgaggaacagcagcaggcgctctttatctactcgtctcatagctctacaggtctgcatactcaggaatagcatcgaagcaggggcactctttaatgcgctcccacgggtctacgataccgttaccattggtgtcaggagagaagtcgcgatgtccttggatcttagccttggggtatcgactacgaagctcgccgaggagcttgcggagtgaggagcgctgggcatcagtgcgattgtcgacacccttccccgacttgtcgatgccacctacgtaggcgacattgatagtctccgagttgtatcccttgaccccattgctgataagctcctcgggctgcatcgcatgcacgaccccgtcagccgtgattacatagtgatagccaggtcgctggaagccacgctgctggaagacctgctggagctccttcactccccacccttggggggaagccgtgcagtgcacggcgatgtagttaatcgttctcttgctcatcgtcttgttgattagtgccttgtttaggcggctgatacatgtacttgttgagccgatatttgtagtcgaccccgaagagcgccccagcgaaggtcgacatctcaccaaatgcaaggagcacggagttgtggatctcccctcgagggacgacaaggaacgccgtccagacgagtgctatgcccgagagagtgaggaggacggctatccaaagttggacagtaaggcgcttgcgcataatagagttagtagtgggcgtcgatgtggatgcccgaggttgttattttgatggagttgacagtttgcccgtccatctcaagttgctcgcgaatgcgagctcgccagtacagtggctggttgtcaaggagcatatctgagacaccgcacccgacagcaggggcttccttaagctcaccctgatgtagggtgagtatcagggcttgattctgcggcagcgtctcaccgagagtaagcccctcgatgatgcgcccttcctcgtcgcgcacaaggcggatgcgaggctcgtagtcggcggtaagcgtgatgcctatcatatcaatgtgtcactttagtgtcttcataatcctcacgccttgatggggtgagacgtttacctgcccaggaggcaacggctgccttcagcgacgctccgccatcattaggcacgggagtccagcttgagagtacctgcttgatgtcgttgatctccctctctagtgtgttgagcttcttcgtcagctcctggaccttgatcagcccgccgagctcaccaccgttgataatgacctcctcggctctatccattgaaagcacaaccaggtggtcaagatcacctgtgagcgtccccatgatgacaactgcacctacggcggggcgcatcaatagttgcgcaccatccacctcggtagatgcccttaggcgcacgtctggaacatgcagtccatcaatggagacttcacaggtaaggtcggagacctgtgtgactactccctggtagagggttgctggagctcctccagctatacgtctgaggtgctcgtgtagctcgcgatatgggtccattattagctaagtctaaagcccagctcgattttccgctttccgccagatgagctgaactccgtcgtaacggagcgaacgaagtaagtaccctctttatgtgggtagtcagggtcgtgtatctctgcggtgtcgcctgcacgacactcaggaacaagccaggtgtcgatgcttccgtcgtatccgtcgaaggtgcgccgtttcagctcggtctcaccgcgcagccgcatactcacctcgtcagaggtaggacacttgacggtgatcttgtctcctccaggagtaccgacctctatctcgcgcaccttcccatcgggtaagagtgccttgacagttatctggtacttcttatcctccgccttgcggtaggtgaggtcagcggactcaacattataggcgaagtcatatagacgctcttgtccgatgacctctcctggagggtgtagatggagcgccccgtcgcgcaggtagatgtcggctccgcactcctcctgcacctttttgagtacatcataggcggtcgccgacttgataatgaacttatcgtacacccaggagtaggtgcatttgaccttgagcgacagtcccacctctttaatgatgcgtgataacaggcttgatagcccgaccttcttcagcacggcatccttgagaggtttgcgaaagaggaagaggtcgtcttcgcaggtcagcgtcaagtcaccgttatcagtggcaatgcgctgcaggtagccagtgaactcctcaacgagccccgtctcctcatatcctaagcgaattgtgacggcatctccacgatggattgcatcttcaacgtcgagcgccttgttgtactcggcggcagggagtgtgatcttagccgtgtctgcgaggagctccaccgaggagtgtatctccaccttgtcgagcatcgagagctggtagccacctatcttgatgtcagaaatcatcgtgtacatagctgactacttggtgaggtctcgacgagtgagcaggagcttataggtatcgtcactcactgcctggagagagaagttctggttagcatcacctgaggtgtgcgggaactcccatgactcgaaaacaatgcgcgtgataccgaagagctccagaagggggcaataggcggataccttggctgcctcaaggtacttgcgcaggcgctgcacatcctccttcggatatcgtccatcgggtccgataagcactccctcaagtctgatgctgtagtcatcgagcgtccagcgctccttgacggaaccacggatcttcccctttgatacctgcctcttcgtgaggatatgctgccccgttatggtgatcatcggctcctgaggtagcagccacggctcctcaccctcaagtgccagagacacggggaagaccatcggcaggccgagggcattcgtctgcacctcctcaagctcctcctcagagagaggtatatctacctcggggagatctccttcagggaggtacacccctgctcgattgaagatgaagggtggaggtattggcagccgcctaattatagtgtcaagctcgaatgttgtcatcggtcagtgcttgttgctatggccagcgatcggttgaccactgagatgatgctacgctccagctcggcggtatcggtcttgtccatcatggacacctgaatgcgctcgacgagcttgccgatattcatcgtgatttgcgtgttgcgcgtaccaccagtggctattgcgtcgcctgtctttccacggccacccttacccttacctttgctccccttctcgcttcccgagccaaagatgacgctctcactactgctactcccgagtaggccagggacggatatcgacgcagtctcttttccgtcattccgcttcttagcctcgtccttggcgatctcttctgcgaggtgcttgtcgtagccagatccaacgccactgaggaggtccttagacgactggtaggcttgcgtggcgctattgacgccgacgaagcccttagcagcatcgcctacggcattggcagcaccagagaaatctccttcaaagagtagcttgatcgccttgccgacgttgcccacagcatcgagcagctcgttaattcggttggtcacgtactctttgatgatagctccgaagcccttaatcgtgtcccacatcgtgaggataaaggcacgaaaacctgcgaacttattccaacaggcaacgactactgtgatgagcactccgattgtgaggacaatcatccctagtgggctcattgcctgtacggcgttgagggcagcttgtgcgcccgcgagtgccgtcatagcacccttggcaataagcgatgcggcggcaagcccatactgcgcgatccgctgtagcttgacagcgatggtgagtgagacgatgatccctgtgatgataaggattgtcgtcttccaacgctcgaagaatcgcaccgtaccgacaacagcattgatgactccgccaatgactgcgaagaccttcggcacatacttcccaacgacctcgaagaggtctaagaggtagggcttgacctgctcgtagatactgacagctccactctgtatagctcccatcatggtgttccatgccccagctccagatgaacccagtgcatccatcattccatgaaattgcccgccttcaccagtcgcatgagcgattgcctgtgctacatttttcgcagtgatctgacccttactcatcttctcctggagggattcgaagctctcacctgtcatcttagagagctccttaagcgggttgaaaccagcacctacgaactgcataaggtcttgccccatgagcttgcctgctgcattcacctggccaaagacaagcgacaacgtggaaaacttttgggcatccccccccgagatatccgccagctgacgcatataccccgttaccttgtctgcctcaatcccaaaagagagcatctgttttgctccttctgtgagttgcattcggtcaaaaggcgttcggtcagcgaactcagcgatttccccgagcatctgatttgcccgctctccattgccgacaagcgtctgaaacgcgatactcgtttgctctgcctgcatcccaatctttgagactgccgccagccctccgccgatgagggcgtaagggttggttagcagcgcaaagccagggatgctactaagctggctacccaagttagaaaagctgaaagccttgctgatggacgcgccaacacgcttagccttactttcgatattgtcgagagcgctaataactcctcgagccgttgaccagacattctcctgcctggcttggaggttgatgaagaattttagctgcttatccattgctttgggcttcgagctttcggagctcgttgagatagttgattgtggccgcccattgatgatcgggcagcgtatcggggtctaggtgtaagtagtagcggatgtaggtgtcaaagaagaggaagctctcccaggaaacctgttgctcttcggaggaggagataacctccgcctccctcagagcttttttactgaggcctccttctgcttgaggacttcatccagcttgccaatagcaggcaggaagtagtcgtcatcctcaaggatctccttgtcgccatccagccagagttgcttaaagagcgtttccgacagctggataggatccttaattcctgatacgaagctgaactcctggcgggtaggcttgcggatagcgcagctcttatcctctacgacgatgaggaagatggcatctttgccatgctgcttcttccacgattcgatttgttcgggtttgaattccatttttatacagattaaaaagcgttcgaaggactatgcactctgcttgcgcaggaaggtgaaggggagggcatattcagtgaacttatccccctgcttccacttgtcttcctccttgctaaaggtgcagccgacaagcgtgtcggtgtggatgacatcgccctgagaggggtcgccatagcacaccacgatggttgtcgaagctcctaggatgcttccaccacaagccttctgcaggaggtggaattcactccccgtaagggtgattgtaccagagtacttgatgttaccacgctggacagccattggctggctcccagccccgtagatgggctcctgctcctgctcggcggtgtactcaatgccacggagaccagtgacacgacgaccgccgaggagcagggtaatggtcatccactcgtactcgcgtccgttgtagatgttcattggagtaggattacttagatgttacagctgcgaagccaagctctacgtcgatgtagcgagcatagccgaatgggcgtaccgagagctttgctcgcacctccgacgtcgcaaggacattggtaggcaggatctcaaagcgacaagcgctacccgtagaatcatcggcagagagttcccccttggcagtcatagctcggtcgatagccgacgtaatttcctgctcccagctacgcacggttgcagggtgcagcgtgccgtcagcttcaagctcaagctcgtcaagaaggaaggagaggaggctatcgtaggcgatgcggtaggccttgtcgatcgttcggcgtgcagttacatgagcatagtcgtcagactcgctcgtcgccagacgatcgtcgcagaagtagaagcctgcgcggccgacatactgacgagggcagatataccccttagtgtagaggtcggcgacagcacctgtctgctgctcgatgggctgaccgctcagatagattgcatcggcggcgatcttgccatctcgcacgcgacctacgttgcgctgcactgcacttgccgcaatgcgaccagccaggagaccaacagcagcacccttgccatcaggctgggtgtcaccgacgaagacccctactctgttgcaagcgagctcgccaaggtccttgagcccctgacgcttgaagccacgaccctcaaggatgacgaagagtggtgcatagagcgcttcggttgcatacactgcggtctcttgcgctttgggaatagcggagaggacatcagcaacgatcccctctgcggcctcaggttcatcctgcgcatccagggcgatggccactgcgcgcagtcggcccttacacagggtgatgagcttacggagctcaccagcatcttcttcggtgtcccccttcgtacagagctcggtcatcgtcttcgtcttctcgacgccatagatgatgacctccgtaccttcaccagcctcagcatagaactcacgcacgtgcttatagaggacagcattgttcttccctgtgaccttaaggcccttcaggtctccaaccgatcgaatggaataggtcttgccgagctcgtaagttgagccaacggccgtagaggcgaccatgagagcgaggagcccatcgggagagtcgcccaccttgccgaggttgccctcggcaaaggtgattttaactcgtggtaactgtgccatgatcgttgctgttagacgttaccctccgcaatcaggaagagccccttcttgtcgtagcgtcggtggctaccgccaaggcgcatcaggaaggagtagatgtctccgtagtactgcggatccttttcactggcgaacatctcgatcttgcccatggcacgagacacacaactcttctgccatgcaaagcctgctgcaacctcggttgcatcgcctccatcgggagttgtaataagctctccattggccttcattcgtagcaccgtactgcgagagaagatgtcaatgttgtagaggcgacctaccgtcccctttgatacatcggccgaagccaggaaggccattcggttcgcttccgtaaggctatcaagaaggtcggcatacatatctgagtcaatgatcagatagcggcctgtggctgggagatcttgcttgtccatgcggatagcaatctggtggacgactttatcggtcatcttcagacgacgacctgtaccctgtgtggtgtgagcatcgcgctgtgcgccatcagtcaggatggtgtgtgccgaatcagcccccttcgcccagcgctgcaggatgagctcagaggcgacacgacgcatctcctccttgtcattgaggatgattgaggagcgcttgttataggacagctcgacagtgtcagcgtgagagatgtgcacgggatcactagtgagttcatccagctcataggtgagatcctggtccgttcgctctgtaggctgagcgggcttggtggtgcggtttacctgcaccttgctgggtctgcctgcattgggcacatggacaattttgttgtccacgtactgggagtcatcctccgacttctgcacaaaggagttgtctgggaagaagttctcttgcagggtttcgatccagacttcggtctgtaaaggcataattgtttgttttggttaataggttggtttatcgtcggaaggtcagcccttatactccgtgccgaagcgctcacggaagagcgccttgaagccttcaaagtcgacctccttatactcactgagaagctcggccttatccagctcatcccaagtcttgtttgcgaacttgctggaaggtgctcccccttcccccgtctcgatatatcggcgtgcgaaagaggggttcttcttaggcgtcgcttgtgcagatggagggatcgaattaatgagctgacgggtagcgtctggattagactgcatgagggcagtgtagtgcggcaggagctcctgggtgattttcccagcctcaaccgctgcgtggaggaaagtttccgtctcctgcgcttggagctgagagagctgcgcgcgaagcgtttggttctcctcagcaagcgcctgcttctgctgatagaggtcctgtacgcctctcgtgacatcagcctcagtggcggtgttggagaacgctggacaactcttacggatgtcatcgattagtgccatgttatctatcatttgtgcctgtttgttcaggcggttatcaaagtacttacgtatttcctctgcggaggaagagttggtaggactatcgtcgtcatggtccatcgagtagaccccatcgataagccccattgaaagacactcttgagacgtaagccagtggtcttgcccatcattgaagtactttgcctcaatatcctcaggagactgctgtaggcgacctgcgatcattcgtgctaaatccccttgcagttgttccatctgctctgccatctgacgcagatcgtggctgttcccatatgtgccaccactcacattgtggagcatgagcttggcgtatggcgacatgtagagcggtttaccgcacaatgctatgatagcggccatacttgcagcaaccccatcgatatagatggtgatatctgctttgctatcatgcagcgcctggtagatcgccagaccagtgtacacgtcgccaccgatactattgatgcgcacatcaatcttgctatacgtgcgggagagctcgagaagctcggcaacgacacgtgcatcggtgatatccgagtacatgccaatctcaccatagagaaggatagccacctcgccagaggaggagggcaggacattgaaaatggaggttctacgtgccatgagtgctgttcttttgggagcaaatttatgggcacataccatcttttcgcaaatcgcattttacacacataacactctgattatatgacataaacagaaggttagatgatgaaaattcgatttgcgaaaagcccctattgcgtgcgaactttgcctcaggaaagaacgaaacaacaggtcacatggcaaagactcaagatacccccaacagcaacaagcgcgagatggcacagcgcctctacgtagacagcggatacactcaagatgaagtagccaacatcataggtgtatcgcgccagaccatcgtgaggtgggcaaagacgtaccattggcaagagcttaaagcagcgacctcggtttcaccagccgagcagattcgtcagcttcgccagcagatagccaacattaacgagtctattctcaaacgtccacttgcagagcgctgggccaccccagccgaagcagactctctcaataagcttgctgcagccatccagaagctcgagaaagaggttggcattgaagatctcgtgaacgtggccatgggtatgacagcatgggtcagagagagtgacaccgacaaagcaaaagcactcggtgcactctttaacgcatacatccaacacatcagcgggggagggcgcaaggtatgaatcaatcggaaaaacaagcccttgcaaggtgggaagagttccaccgctcaatgcagagcaacatatttgttgacacctccctcgcagcgcatgaggtggaggctctacgcctacaactagaagccgatcctatacgctggatacagcatatcttcccagcctatgcaaaatacccctctgcggactttcagaaaaaggccatcctccgcatcatagagcacgaggagtggtatgaagtactctcgtgggcacgtagtctagcgaagagcacggtggcgatgtttgccctcctctacctcgctctcacaggtcgcaagaagttcatcatttgcgcctctgcaacggaggatgctgccatacgacttctcaccccctatcgcgtagccctcacaagcaacccccgattacgtcaactctatggtgagcagaagacccttggtgcctggacggaaagtgagttcacagctagatgtggctgtatgttcctcgccatgggcgcggggtctgctcctcgtggtgctcgaaatgagtacgccagacctgacgtgctctacctcgacgactacgataccgacgaggactgccgaaatcaggagaccctaaaaaagaaatgggaatggtgggagcaagcgctctatggtacgcgagacatctcggagcccctccttgtgctgtggtgtggcaacataatagctagagactgttgtgttgctcgagctggcaagcaggctaaccactgggacattgtgaacatccgagataagcaggggcgtagtacctggcctgagaagaacagcgaagagaagatcgaccgagtactatcgaagatcagcaagcggtcacagcaagccgaatacttcaacaatccaatagctgaagggaagatcctcaaattactccccgttggcaaggtccccgacctatcaaagttccgcttcctggtcgcctatggagaccctgcttactccgacagtaaaagccgaaagagctcaaccaagtcactatggctgatgggtaagcacaaggagcgctattacatcattcgtggatatctcgggcacgctaccaatgctacattcatcagttggtactttgagcttgagaagttcgtcggtggggcttgcccagtgtatcatttcatcgaaaacaacaagctgcaagacccatttttccagcaggtttttcgccctctcttgcacgaagagaataaacggcggaagatgaacctctacatacgacctgacgagaagaaaaagacggataaagccacacgtatcgaaacccgcctagagccgatagaccgcgaagcgcgatgggtctttaatgtcgaggagcaggataacccaatgatgaaagaactcattgatcagtgcaagctctttgaaatgcacctgccctaccctgccgacggaccagactcactcgagggggggatacacatccttgacgaaaagctcctagagttggagcctcctaccaccattggcttcggcgaattccgacgcaacaaccctcacagactatagcactatgcctacaggtaatttcatcgatccatccgactacaatagctccatccatagagagatacttgactcactcgttcggcgcgagcggagcgcaggtgttcccaaccccgactacgaccccgaaatcgtcgaggtctgtgaagaccgagccgtaggggagatgcaaggctacctcatgaagagttatgatacggaagcaatcttcaatgctcgtggatcagaacgacacgctctcatactgatgtacgccattgacattgccatttatcacctcttctcgcttcacaacccttacaagatatctgaactgagaaaggctcgctatgatcgcgccatcgagtggctcaagatggtagctaaagggaccattacaataggaggtgctccacgcctatctgagagtgaccaaacccaaaactccccatggcagatagaaagcgagccttctcgaccacaccgactatagacatggcaagaaccgtagacgaaattaagcgagagatgaccgatgcattcatggctgatccagtcatccgcgagaagtaccagctcaaggagggggacaccttccgctcagccttttcgctggtcagcctggagaatatcctctttttcatcgtagcagctgcgcaccatgttgtggagcgcatcttcgatgggcaccgtgatgacgttgagcgcacgcttgagcgtgctatcgtggccacagtgccttggtactatcacaaggcgctggcttatcaacatggcgacaagctctcccttgatgaggcgacgatgcagtatcgctatgacaagatagacgaggggcgtagggtggtcaagtacgccgcagtccgcgaccgtggcgggagcatacaaatccttgtctcaggagaaaagagcgggcgccccgaagcactatcgaaagaggtactaacggcgttcgaagcatatatccgtacactcaagccagcaggcgttgtcatctctgtgcgcacctcccccgcggaccacatccgcatatcagcgactatctatgccgacccgatgatcctctcccctcagggtgtgcgctatcgagatggtgcgcgacctgtagaagaagctatcaacgcctacctcggcggcatcacattcggtggcacattcaacaagacgaagctcgtcgacgctatccaagccgtcgaaggtgtcacagatgtcatcctcggtgactgctctgcacgcccagacgccggcacatacaagagcattgacggcaataactacaccgcattcagcggttcaataatctctgacgacctcaactcaacgcttcgctatgtggtataaattcgacccgctcaagttcgcggcggatatgctccctccagttctccgatcaaaggtactcctcgctatcctacgagcactactaactccactcaggagactccttgacagattcggtcaattccgtggagacgtgcaccgacggctcaacactacggggcagaccttctccctcgtcgctgcgcttaacgagaagtatagactctctccaggagcgatctatataaccgacacggacgataagcagctctacctctacttctcatcggaggggaatgcaccgcttcacctacacctaatctccgagcggcaagaccccttctacctcagcttcgcgcatgaggggaagcacgagcctgacttcatcgtccacatcccctccttccttcgtagcgaggaagctgaaatcatcagattcatcaacatctataagcctgctggcagaacatacaagatagaatactacgactatgaatgagattaaattcactgagggcgggcagcctatctccctcgacgacctcaagcaactcagcgacaacatcactagtagtgtcgcactactagcaagcctctgcggcgacggcatccttgacggatgctacatctcaggtgatcaaacgagtggaggcgcacgcattttcatatccccaggacacgccattattgggggggctatctatgatgttgacgagactgaaatgctctttaatggcctcggcctgggcaacctcccatcagagatctaccttgtcccctcggccgatgagagtcgctcgatggattttgccgacggaagcacgcatccaacccgcgtgcgaaagaccgcgatagctgttcgtgagcgtccatccgacagggcctacattgcgtacaagctatcagctaacaacagcagcaacccacgcccattcatcccgaggagcgaggaggcgaaggttgacagctaccgtatccttcgcgatggcaagcaggtcggcaacatgaatctccatgttatcaacggactccatagatttagggcttgcgagctgcatattcccatcgataacaatgtcatcagatcaacagatgctgtgaatacgatgtacaccatcgatggacccaactccaacaagctctacttctcccttcgcaacgtagtagatatctggcaaaggacgacctacgacatcatcatcgcagggggcaacatctcgctgcagaaggagggccagcgcatcaacgaatttgacggtcatgggcttaatgcctttgctctcattaagacagactactctctcgtatgaacaactctcagatagacctcatcaaacgtgccgaggccctcgcgtccaagactgaatcgggctcaatcacccccgaagagctcggctacctcatccgcgatgtcgccgcctatgtcgccgaggtagagcgcgaaggtggagcactcggcgtacgtaaggtgtacacctccatctcggcgatgaagtcggatacgactcccactggcgacgacgacaagcccctacgccgtggcaacctcgttgccgtttatgacgatgctcaccctacggcagcggacaacgggcgtatctacgtgtacacaggggcaggctacacggaagttgcacatctgcaggtgcaccttagtaacccctactcggacgaagataagacaaaggtagacctcatcaagactgatgctggcgaggatcactaccttgcaggcgacggtagctataagcctatccgtgtgcctcaagcccccgtgcagagcatctccgtgggcggtacgaacctccctcccgactctcgtggtaacgttgacctcaccatccccaaagcaccagtgcagggtgtggcagtcaacggcagcactgtcgctcctgacgaatcgggcatcgtcaacatcgagaccaagagtggcacggtacagagcgtcacgctcaatggggtcaagtcgctccctgacgagtcgggcaacgtggctatctccatcgatgaggtggctgtcgatgacaccctcagcgcggagagtaccaacgccgtatctaacgctgcagtcacggccaagctcaacgaggtagagcgtgccaccattgcagggatggatgctcagctctcagaggacgagcagaccgtcacgctcaagctcaccaacaagcaggggggcgaggtagcctctgttgacctccccgcaggtgggaagggaggcggaggcggtgatcagcagaccacccgcatcatcctcacctcctcggtgtcgcagtcggccgtcaaggctggcgacaccgcacagctgacctacacctaccgacatgtgtcggcagacaacgacgaggctcctacgggtgtgcaggcgactatccgcctgaccattcgtcgaggggcgacccagctcctggagcagatcatccccgacgtatcggcagggatgtacacccttgaccttacgccctacctcaccacggcaggaacagtagacgtgcagatactcgccacggctaccaacgccgaggggaagacgcagaagcgcacgatcgccacctctgtagccgtctacgctcttgcgcttaactcaagctactccctctcctctggactaccaggctacgctacaacggacatcctggctatcccttatgctgtcactggggttggcaacaagaccatcaccctctacatcgatggggtgagctacagcgtgcagagcgtcacacgtgcgggtacgactaacggcaccttccaggtacccctccagggggcacacgagggccgtcacacagctcagctcatcgccgagctcactattggagctaaggagatccgtagtgagagcatctactttgactactacatcggcaaaacagaggaccttcctcgcatcggcgtcatgctacgtcgacacgatggccacatcctcccagccgaggagcacctctcaccgcgcctagacgcagagcagtttgcgagctacagctttagctacgccctctacgaccctcagcgccaacctgccgacctatcactccaggtaggcgactccgaggcgctgtcgctctctatgggccgaggcgcggaggtctacacctcacgcagcgtcgttgcaggggatatccctgcacgcctatccacgcgtcttgacgtgagctacgacctcaccatctccgtgcgtgaaggccacgttaacatcggggaggtcaccgacggcgtgaccctcgctctctcagcactcggacgcagcaactccgaggctaatccagccacgtggaagagcagcgggatctccacctccttccgtcagttcgactgggctgctggtggctgggacggctcgtcgctccagcttgtcaacggctcatccatcactattcctgcgaccttctttgccaccgacccgatggggcttggcggtacgatcgagctggagcttcgcaccgacaacgtcctctcatcgacgggcgcggtcgtctcctgtcttgacgacaagggtgtcggctttatcgtcacgggtaagcaagccgagctgcgcaccgcgtcaggtgcggttgtagtcaccaagtttgccacaggtgagttctaccgcatcgcctttgtcgtgcagccaaagtcggggagtcgactcctggagatttacgtcaacggcatccgctcaggggcggtcagctacgggcaggcggataccctcctgcaggttgcctccaagcctatcgacgtgaccagccagcatgccgacgtacgtcttcgtgccgtacgactctatggccgcgcactctccgacgatgaggtgctcagcaattacatagcttcacgccctgatgctgctgaggtcgtgacgctctacgagcgcaacgatgtcctcggcgacgacggagctgtctccctcgacaagctccgcagtcagggtaagagcgtgctgcgcatcgtgggcaatgtccccctggtcaacgagaccaacaccaaaaagttcgaggtatcggtagacatctacttctactcgggattcggcaagcagtatgacttcgtctgcaagggcgctgggctgcgcatccaggggacatcttccacgacctatccccgaaagaactaccgtatctacctcgaccgcaagaagaagtacaataccaccctcacggtgggaggtgtagagcagcaggagcttaagtatgcctttacgcctggagccgtacccgtttcgatcttcacgattaaggcggacttcgctgagtcgagttcgacacacaacacggggctggcaaagctcatcgacgaaaccttccgcagagcaggcattctaacacctccccagaaggcttcgcagggcgttcgaatagctatcgacggcttcccgatggatgccttctttgacatcgatggggctggccacaacacctacctgggcaagtacaacttcaacaacgacaagagtggcagtgaggaggtcttcggcttcatcaaggacgacaagtgtatgtgtctggagttcctcaacaactccgagccactcgctctgttcacgaccgacaacatggcgagctttaagacggcgctcgagttccgccatcctgacggggtcgagtgggacaccgccagcgaggcacagaagactgccgtacgtcgcctgtggaagtggatcatcaactgcaagggcaaccccaccaagtttaagcgtgaggtggccgactacttcgacgtggatagcctcacggggtggtacgtcctcaccgagtactttatgatggtggaccagcgtgcaaagaacatgatgctcgccacgtgggacgggctgcactggcacttcctcccctacgacaatgacaccgtcctcggggtgcgaaatgatggtaaggtcgtctacgactacaccatcgatgagaataccttcgacgagacgatcggctcctacgcctatgctgggcacgactccctcctttggcaactcgtcagagaagctcttcccgacaagctccacgagacggcgcagaagatccgcgctactatgagtaaggagcgcgtactggagatgctcaacggcaagttcatgaggaactggtctgagcgcgcgtacaacaaggacggtgagtacaagtacctccagccctatacggcaagcggcatcgactacctctactgtctgcagggctcacgctatgctcaccgcacggcgatgattaacgatcgctttgcactgctcgacgcccagcacctggcgggtacgtatcgagccgatgcgctgcgcctctactttgcccatcagtttagctccgaccgcaagcgcatcagcatcacggccagcgagcgctactactttggctatggctacacctctaaggctccccatgtctcaggggtgagagcggacgcagcaggctctaaggtgtcacttgagctggacatcgacctcatcgtcaacgacccgcagaacatctacggggcgagtcgtatggcggagcttgacctctccgacgtgagtgcctacatcgtcggtacggcgaacttcgacaagtgctaccgcttatcgaagctcaacgtctcatgcgccacaggtcaaacaaccctcacggccgtcaccgtaggtgcgtgtcgtgtgcttgaagagctgagtgtggcggggcttcgctcaccctccttccgctcgcttgacctgacgggaaatccccgtctgaagaagctcgatgcgtcgaatactgtccttacggatattgtgctggcaaatggctcccctatcacagagcttcgtctacccgaatcgctcacgacgcttcgacttcgctacctccccaagctcactaccgaagggatcgtaggactgaactctgagactgtcacccgcctctggtatgagggatgcccacagatcgactgggaggtactcctggagcagctcaccgctgtgacgcacctgcgtatcgtcggcatcgaccgaacgggggatgtcgcttggctcaaccgcttcctctccaagggtgggatttccgcgtcaggctcactcaccacgacctgcgcgctcgtaggcacgtaccgcctaacgcaattcatctcagatgtcgagtacgacaagctcgctgctcacttccccgagctcagcatccgacagcccgagtacaccatcgtagggtacgtcaaccgcacggtggataagcaggggttcacccaggaggtgctagctaccgaccgctggttcaaccacgacaaccagacggggttcggctttaataagccctacgcgccgtctggacacctcctgcgtatcttcaaagctcgccaccgatggcgcggtagagaagagaagcgcggggagatggtggtctatcctctcagagatgatcacttcggctactacgctgatgggctcacacgcgacctatccacgccgaccaacctcgctgacgcagaagagggtggcatttgggtgaacgagccacactactggtacaaaggcatccacgacggggacacttgcaccgactaccaggtgtatagttcgctcctcgatgagccacgccgtccagaagggaagctctatgacatgaaagcgattgagagcaagctgaagcccgtgctacagcactatatccgctgtcctaaggggtcggaaggcaagaacatctctgagtgcatctacaagtaccgcgcgggctacaccaacgagaatgcctgcaacctctactcttacatcaaggtgcctgtcaaggggtataagagggtgaaattccccctgtgcaacaacggctacagcaactccgacgatccaaaagacgaagtcaagcatcaaggctacttccagccagaaccctacgccgatcgatttaggtgggagagaggatgcatgatctcagcggttttcacggatgccgatggtaagatccttaaggtcatccgactctccaacaacgagtacccgctctttgtgttggactacgtcgccagcatccctcacggcgcagcctacctctacacctctgtcctcaccgaattcattgattcggagatggaaatatggctgaccaactcatccaaccctgccgactgggagccccactggcaagagcacaaggagacctggacatcagctgtgccgatgcactggcaagagggcgaaagcctccccgaaatgactattggggagagcaagaggctcgggaagcaaggtgagatgcagtataagttcatgctacttcatggcatgtacgaccagctctcatacgaggagtacaaagacctccgcaacctcctctgggcgcataatggcaacttcaagctccgagacatctatggatggggggaaggaaccacggagactgagcggcacttcaggggattcttctcgctacccgaggcggggatggcaggaaccacggcacgaaacccccaagggaagatttccgaacgtcctggcgtcatcgtgcaggatggcaatcgcaaccccatctacaaagagtgcccttatcccaccgccttcggctatatctggctgcccagctcgttcatcctctctctgtcgacatacacgaaagacggtgcttactgcgcgcactccaagcacgatgctgtgcgcggcgctgccaccacgcgaagagatcacgcagacatcggtgaccactacaataaacttgtatggatgcgcgagtggaggcactttggaggcgttgagcgtcgcattcacccgctcggcaaatacgagcgcaaggagtatgcacaggagacgtctgtactccaggttgtgggtgggcgatatctcgacattgtcacgcgaaagaatggggggagtcaaaatgtaggatgcgccatgcgcaacctctttggcgagctcctcaacgacaacgaggtgtattcaacaaaccacgaggcatggggtaggtatgccgacggtggggtttacaccaaatgggactggacccgccaatttctcgtccccatcttccgcggcaaggtgatcaaagcctcctctcccgaagagctccgcaagctcaagcattacaagttcctcctcgaagaaagaccagacctcagcaaatggtaacgacagatcgccaaagcggcaacccctatatgagcggtaagctcctctactgcattgatccgctcaatgagcgctacctcatcgcctacgacctccaggagatcgacagcgaagagggagccccgaagcagtacacctatctcaccgaagtatttgaccaccgcccctctctgcatgaggtggcggaggtcatctaccgcccatacaacgatctctgcgacgatcgggtgcttcgtggatttagctacaccacgctggaggagacgcccgtcacacgccacgtatggctcgacgagaccaaccagcgcaacttcctcggagagttcaccttcgccaagctctttgacggagtgaatctgccgaccatcatcaagatggggctttccgaggatgaggcctactattatcaggtctccacgctcaaccaatataagcatttcatcctctcggcgcttggccacatcaagcagtgtctctccgagtgctggacagccaagcaagcagtagacctcaccccttacacccttgacagcaatggcacgcaagtcaacaactaaagcctcgcgccgcattatagcggggggagactctgtacaagaggcagacattattctctctgcccctgagctgttctatttcgacatcaacaagtatatccgtagcattaaagcggcgtcaagcatcaacttcagctatcgtacgcagctctacgacatgtatgagtcagccttcctggaccttcaccttagtggagttgtcgccaagcggctcagaggggttacaaaactgcctattgagttccagcgagacggggttcctgatgacgagctgaacagacagctcgcctcgccctggatgaaagagctgcgaaaggatatcatcatggctgatttctggggttactcgctcttccagttctacctggacgaagaagggcgtctacgctatgacctgatccctcgcaagcactacgatccgatcaatcagcgcttacttcgctcccagaatgataccgaagggcggagcattgaggagttcgaaaacatgcttttcgttggtaaggagcgctctctaggcattcttgctgagttgatgcccgccatactctacaagcgcaacaatatcggtgactgggcgaagttttgtgagctatttggcatcccgatccgaaagtacacctatgacgcaggagacgaggagacccgccgtcgcgtgctcaaggatgccatgggacagggggtaggcgctgtctacatcatgccgaaggaaagcaacatggagattatcgaggctggcaacaaatcggggtcatctgagctttacaagagctttacagactattgggaccgcgccatctctatccgtgtactcgggaatacgctgactacagatgccagtagcacaggaacacaggctcttggcaccgtacacaaggaggttgaggaggaggttaacgaggatgactgcttcgcaatcctcgacgtgctcaactactacctcctgccgatcttcgaaaacctcggttttaacgtttcggggggagagttcgtctacgccaagcgagagcggcacgatccatcgcaacgcgcagacctctacctcaaggctcaacagctcggattacctcttgaccctgacgagatgtacgaaacgatggggatcaagaagcccgatgactacgaagagcagatggctattaaggaagaacatcgcagggcgattgccgaagcgcttgaagagccttcgaagggagacaaaacgtcctcagaagaaccttcgagggaggacgcaaaggggaaaaagtccatcaaagacagccttgctcgttttttcagattagccccaggggaaaatcccctcggggcggacagcgacttctaataaacgctctttactatggttgtccctgcgcctcatgctcgccgataagcaactccacacctcccgaggcggtattctcccctgaggtgatggagggcttcctccgaaagatatacgatggatttgatgtctctaacgacatcgagccaacagcgtggagggaggtgctgcgcatcatgaattctggggctgtgcaagggctctccgagagcatgagcccacctactcacgaggaaggcttcttgcgcagcatacggcactccaacgaggtattctccgtcttcaagacccacgcaatgggaacaaagatggcggagcgtcttatcggtgaggacgggaagctccgctccttcgaggagtggcgcaaggctgttgcacccatcgctcgccatcaggtaggctcgtggcttcgcaccgagtacgacaccgctgtcatacgtgctcatcaggcggccgactggatcgaattcgaggccaataaggacatcttccccaacctacagtggatgcctaccacatcggtatctcccgagtcaagccatcaggtattctggtcgaagcccgtcatcctccccgtggatgaccccttctggcaagagcatcggccaggtgacaggtggaactgcaagtgctccctggatgccaccgatgctgatgtgcagcgtctcgatccacaagagcgcaaggaggctgcaaagccagagcatcaggcacagcgcgggcttgagggaaaccccgcctataaggggctcatcacgaataagcacccttactatcccgagagctgcgccaagtgcccgttctactcctctaagggtattaaggggtgggtgcgtaagcacctctctaatcgtgtcaaggactgccataattgcccgcatgtcgatcttaagatcttccaggccaagctcagcgagcagtacccccttgaccgatgggagcacacctttatttcggattcaggagggtacgtcgtgacggagcgcttaaggatcaaggaaggcaaggtaaactctaccgagcgaaagaaattcatcaaggagctggagacggctaaggtcatggccaagcatgggttcgcaatagtctaccttggggagagcggtcgaacacagggaaaaacctacgatatcttactaaatgggatcagctgtgagatcaagtgtttttcaggcaagcagggaggcgctatcgaggagcagctcaagtatgcattcagctcccagggagctaagacggttgttgtgcgcttagaggagcgaggcggacgtgcatacgataaacttacgacctgcctcaaaacgcagaagctacttaaggataagccgatctacttcttctggatggatacccccgaagaactggagatattccccagccgcgagattatcaaaataaaataaggggctgaagcaacaagctccagccccctgtggatatcggagtggaatcttacgacccctctcctccccctttcgggataccacaaatataatcaatatatatgtaaatgcaatccgctaaactcgttaaggtcattgcccgcctcaccgcagagtacgagaaggagatcaatgtagtcttacctcgcagggttgcggtcctggcgaagcaacactacaaggctaacttccgacagtctgggttcgttgatggaggcttgcgtccgtggcagcgtgcccagcgagagggagggtcaagcacctcagctcagtaccgcacgctcacctctgcacgcaaccacttgatgagtagcattgaggctgtgccgagtagggcatctgtactggtttacaaccccgtcccttatgcccgcatccacaatgaaggcggtatgctcatatctaatcctacggtcacaccaaagatgcgtaagtatttctgggcacagtactaccacgcaggaggagacaaggggggagaggctgccgagaagtggaagcgcatagcgttaggcgcacgtgacaagctgatgatcaaggtgcgtatgcccaagcgtcaattcatcggcgagagtaaggagctacgcgagcgtataaacgaagagatcatcaagagtattaacaaggttagcgacaacgcgcttaaagaatagctatggagtatcttattttacctataatacagcatgtagcagggggattacccgagctcagcttggttgacgaggactacggtcaactggaggttatcgatgacgacgggcgagagatgtacccgatcacttatccagccgtcttgatagaccttgagcaggtcgattggagcgaactatctggtaagagccagatgggcgaagctcgcctcaaaatccgcctcatcattgactgctacgatgacactcacagcgggagtggcactgaaggacgcatcattgagcgagaggacttgcgtaaaaggctacatgggctactagagggatttcgtccgaccacagagtcatcggggcttacacgcgtcgagagcaaattctacacttggaatcatggcatcaaagtctaccaagaggtgtacacctgccgtatctcggaggttatcacccctcaaatagggtgggctggagctcctccgtcgattcacatacagctctcttcctcggcccacgaaaccccgtaaactccctcttcggagcctctgaaggagtatctttgccgttaataatggagcgcagtatatgtaagattgtaccctcggcaataaagaattcctgctccaggatctcgaataccgcagagtagcgcatacgacgaacatccaataggtagcgatacctctggtacagcttttggttgcgttgctctatgagctctttacttcgacccttgggcatattactgatgtggtggggattatctaccacaaagatacctccaatatacctctcacagcaaatacttgagggggcgtgtagctgttgccacacgccccctcaatcgttgtaggtctgcttagtagtcgggatgcgatcttagcaggcgcatcgtctcataccagccagggaagcctccgaggttcttgtcgtcgatgtagacattggcgtagacctttttgcccccatcgccatagatcgcaaggttctcaggctcgtggtcgttcactcggtcaaatgggatgccctcctccaggagccagttgatcgcgttgacaagcagctctcctgttctgcaagtccagatgatgatgtagtgacccttctcgcggagctcttcgaggctctttttcgcgcctggcatcgtatttccgatactggggtaggcactctcacagagtgtgccgtcgaagtcaacagctataatcatacgtccgtctctttaggtgcaacatactgatacacaccgaggatgccgaggtctgcaatgccgacgatctcatacgaggagaggctctcgctgaggtgagactccagcagtgtcgctgccgagagcaaagagtcctctctgaccaccattgccacggaggtcttacgctcctgccccgagctcgcatccagcgtgatcaagttgaccttcccgcggtagtagttgctaccgttgttgctgatcagcatatctgccaatctcatcgggcggatgttcaccacttcgagcaccccgcacgaaacgaagggtgttacctccttgatgatacgctcctcagcctccgtgaaggagagggcatccactagataactttcagagacctttctaagtcccatctcgtcgccctgacgttcataggcgacggtacacaaataccatttattcatacttttcttatactaggttaagagccttcagcaactcgtactggaaggctgaagtgatctcatcttcccacacatggtagtcagtgtttttccccaactcactacctcttaggctaaggacatagacatctcgtgtctgaatctcttcggtcggctcttggtcacggggtaaatccacaagttccacgcctttacgaatcatatatccccccgcatatacggagccgtgttcatcaatcttctcgagattaactttaagaccctcaatatatgcttttacgactgctctctctgttcggcggtagcactctgtagctatatatatcgctttctcttcgctggatgcggagaacttccgaaatgaccagccaacctctattatccacgttcgctcttcgcccatggttcggagcgaagccagacccattggggttaaggcgagcaaatggcatccgttttcatcttcggtgcgggtgggatcccagctctcccacaattcgccgtgggagagctgctgtgtgagagtgtacgtcatacttcgaccatcgatagggggatgttcacccacttgcccttctcgtccttctcttcagcacggatgaagacacgcgtccactcggataagaaggcttccttaatgatggtcacgcctcgtgcaaagcgtgggtctgccaccatttcgacatacttatcaagctggatgacgttctccgcctgaagctgaccgcggccatcacgcgagagtaggtcgaggatgatgcgcacgagcttctgcgacttctctccatcagccatcgacgcgagtgactcttcgatgagggagataccagcgtctgccgttgcgtcataggagacctttttatatttcccaatcgtgatgcgctgattagcctcctcatttcgtaaggtgtgctgcccctgctctttccccccgatgagggagattttaagttccagaagcgagctgaatgtggagaggacacgcatcttcgcacacttgagagcttcactcgccgccttcagatctccgaatgtctcggatactgcctgcgcggagagacgacggaagtcctcgcgttcactcttggcgcgctgctcttctgcgcgtgcctgctcttgctctttgagacgctggtactcggccagctgctcttcggtgatagccaccgtcttgttttcttgttgttccatcttacttattgcatgattttaatgggtgattctactccatcgcggtagcgcttgtccatgcgctgtcgcaccgcttcgatcttccagccgagcgcgttatatcgacttcgctcagctggcgtcgccgtgtcggctcgtattcgctggaggagctcgtcacgctcctgctcgtacatctcgatatcctgctggtaggactgctcaagatgacgcttggcagccttgtctattcgtcccatgtgtcattagttaggtagttgtcctttggtgatctcggcacctaacgccgccctgcgctgctcatagcccttcagctctgccttattgcgtattgacagcatcttcactcggagcgccttcagttcggggatagtgaggtatcggaagggcttccctgctatacgggggatacaacagaagcggtcaacagcatcccagtcggtggtgtcgatgccatagagctggaattgcctcagtactgctgagcgagcctttcgcttgtcatcaaggcactctacctgtcgcctcagatccctgatcatcgcattgtactcatcatcggtcatctcccgtagtgacctggtgcgtcctcccgtccactgtaagaccagttcttctttagatgcaccaggcatcgtccctaggagggcatagaaggaggcataagaattacgcttcgacatcactatctcccgtctgattattgccttgctccaggagcgccttttggagttcctctttctgttgtagaagcactttgatttcgttgcttttatttgcattagttatcaaggctctttcaaacagtgctatcgtaaaagaatgagattcctcgagctcactcagttccttcttcagtcgagcattctcctctcgaaggctttgacaatctgattcgtcctcatcactctgtgcatgtgatttttcttcatccttatgagtagagatgccggcaaagagcagtagaagcattgccccgagagtagctccgattaagtagtccatcggttccttttaattcacgttaatattgagattcattttcatttgtttcaagcccccagtacttagcctctgctgatgcccagatgctgtagtgcttacctgattcgggcatgaagcgtcccttgcatattgctcggtatccctgtactaggatcttcatgtcggcatcgtactgtacactgacagcggttgaccctttgggcttctccccatcggcgtgcgatacgaagatgaagagcttgttagggaattgctccttgagcttcttgtactccttatagttcatccctgtgtactgcaaggagtcgatgattatgaagtctggggagcgttggcgcttgaggcgctcggtgagggcttctatcggctctctatcgaggatcaagaagcgcccccgagcctcctccattcggcatcggcgcatattgttttggaaggagagggagagggactcttccaacgagttgtaggctaccttaccgtgcttagtcagttctcttgccagttgcatcgcaaaggagctcttcccattggcgctctctccccagataagccagacacctgtacgtcctggctccccgaaggcatcccgccacaccccctcgaaggggatgctggggatcttcttgcggagtatctcggagggtgagtaggctctttccatcgctatgcccccgcttgtagtttgagcttctcaatctcggtgtaagccctgcgcaggcttcctgacttgcgtgccagacttacagcatccaccccttgggggacgttgagctttgccacctcgaccacctggcgcaggaggaagttcttgcgctcctccccatcgagtggagtcacctggcggtaagcatcgccgaagcgggagaagagctcggtatagccgacctttctacagtcgatgcttcgctcaatctttgctcgcaagccatctgcgcccatcatataccatccgcaagcgttctccaaggcattccacaaggctttaagctcgaggaaggcttcatactgcaggtctcccgcctcatcaaggatgatcaggggctggtggaggctcttgacgtagtagatgaggttagcgtagatctcctcatacctccccttggcttccaagccaaagccaagggcaatctgtcgcaccagacgaaccttcgtcttgacctgagagcagtccacgtagacgacgttcttatgcgtccgagcgtattgccgagccgagaaggtcttaccgatgttcggcaggtcgcagaggagggcagagaggcttcgctcctggcaggcttcgagctgtcccgtgacgtagtcgaaggtggcggttggtgcaaccttccattcgatttcgccacgcaggggcacgttgagtcgtcgggcgatgctcagccaagcagtctcactcagctgtttctcgactttccccttcttcaagacattgtacacgctgggcgagatgccgagggcggtagcgtgcttgctatcgctggggtagttagcacggtcggcgagtattgcctcgagcgtgcgccccttgagttctttcgttagttccataattccttgattagtttctttgcccagcgggtgaagtgcttttcttcgaagtagatctccccgctgtcactcttataagccttaccaaaggagcctctctttcgtagtcgcttggctcgttcttcgccaaagaccctcttgaggtcatcccacatatagcagggctcaaataccaccgtcatcttcatggctagtcgggacagaaggattgcatcgtcagtgccgacttaacttttgagctgaatctctcaaagtcgtagactattccatcgtagatctcggggatgcatagggcgataccaaaggcaccttccttgtccagttcattgaaccctcctccatcgaacgtctcgataagctcctctcgagtccagtagtcttttccgttgtactccatttctaatctgatttaattagtgttcgattactattcttacaggtctgctagcgctctcgctcggatgtcatcgacctcggaggaggtcaccagccagtcctctgtttcgttttcgtcgtggagctcaccatcctcgccacgtcgtaacgtgaccacctcctgaggctcgaggtcagtaagcattcggtgtgtctcttccttcagcaggcgtgccttgctcggcaggcgctccgtgatgtagttgtcgaaggactttacacgctgtagctgtccgtgtagcttcttgcgatcctccgccgtctgctcgatcgatgcctcgttgaagcgttcgacctcgacagcagtctcgatgtaccgcccgccttcatagacgtagacttcatccatctgcccttcctcctgctcccaccagtaagcatctaccttaccgttgcggtctttaagcttcccgatagcttggggcgaaagggagaaggagcggtagttcgccttgatagcccctcgacgcaccgaggttgctcgatgctctccgagcaagacggctaaacggtgcttgtcgatgcttgctagttcggggttgaccgactcctggaggacttcccagcgggtgcgaccaccccagtatgcctcattcgtatgcggtgagttgttgtactctcgtatcaacccctcatagaaggcgacggcatcctcgtaagcccacaccttcgacttgaagcggtcattatgctcgtcgaagcttttctcctcgctggtctgattagcctccaagcgtgcgtagtgtcgccccgtgttcggaataaattccttctctacttcatacttaaagagcctgttgaagtgctcagcgccctttgcctgcgagttccctggtgccaagaagagcgccttagggaacagtgccccgtccgccatcagagaggtgcggaagtccgataccagatgctgttccacctctgcttcatgtgggcaaggtagcccaagcgagaggagcgtgcggaaggtcgaacgcagacagccgatgaagatgtcgtggcgcttcttccccgagaaggcatacccgatgattgcttggcttgccaagtcgtaagccacgtagatcttcaggctgacggtctcgctgataccctgctctctccagttgaccttaatcttgaggtctcggtcgtccagggagatctttgagagggacatcgttgggcgcttacgcatcacgtagggctggtgcttgcctcgccatgtctgataatcatcgtgcaccttacctcgcagtgcctttgcctcaggggtattgaggtagaaggcaaccgtagaggcggagaggggcttgtactggcgattgtcgtacagctcacctgtctcgggattgtagatagctaccaagccttcgacgaagtcattgtagcggtctgccaccgtgctattgtatggtcgggtgtcatcgttgtcgatggcaaggaggaggcggagcgtgtcgtgatcgaccttgcgagtctgttggttgccgaacttcttacttatgagactttcgtagcccttctgctcaaactctcgcagtgccttcctaaagcggggggcactctgtgggagcgtatgcccaacttcttgacgatagtagccgatagcactcgccagttgttcccagcgtaccttcttgttacctcccatcactcgcttcaagaggcgtatgtccgcttgcaagctccgtacgctctgtagtaccgacgcattcacgatgtattcctctgtcagctgggctatgcgctcaagagagagggtgaggttaagctcccgcaggcgcttgggatagtactcctgagcttggcgatcccgctggtagtggtcgctgaaccacttgcggagtaccgctacatggacggcatcgctcccaattcgctgatctaccttatctcggaggtctcggggcaagctgtcgtagtcgatgagcgctgagttgcctttgcctttaccctgacgcacaaccttaattttgcctctgcgaaccattgcttggtagtttgcatagacaatgacgggagctaagcactcggactggttatcggaagttcgtcgatcctcaatgaggtcggcaaggtctatcaccatggattttccgtagtgctgaagcatagtcttagagattggaggctagtgtctggagcccatcaagcatattgatggtcacgtggtagcagagactgactactcgcccattatgctcaatgcgtccttcgctgttacccttgtcaatgatgagccgtgcgccattgctgaagacctggatcatctgcccgtcagcgtcgtgtatcgtctcgcactctggtatggtgcagtagacctcaccgcctagctcgagagccagagcacgtgccctctttgcatcctctccgtctcgcttgtagttgagggcgagtgatagcccaccctcagagatgtccagctcctgcatgatgcgcttgcggacatcggcacccacttcaatgtgtcgttgcatagttgttgccatgtgattattgtctctaatcggtttctgtctatctttacacgttgttaagtcttaacaacactgcaaagtaacgagtaaatttctacggatgcaagaggaaacgaataaatttatcgcaccaatcaagggtagggttcgtaagtatctagatgataaagggataagattgtcatcttttttttctgaaacgggggtttcagagtcatccttccgaggaaaatctgctcatagtgaatttggaggagaaattttgtccgtcatagtccgtacctaccccgatatatctgcacactggctacttacgggagaggaggatgttgctagagcacaagcctccatcattggcggtaaagccaatgtcatggctaaagatggagctaaggtgacctatactcattcctgcctagataactgtggatccttctccgagggaaatacgagcgtaaccacccttctagagaccctcagagaacagctgggggaaaaggatagacagatggctgagaaggataagcaaatcgagatgctccataagatgctgtcaaaacacatggatctcaacctgtagacagcttgtattcgcttgaatataaagagtttgcacttggttccgtatagtaatacccccatcaactcacaacaaaaagagcattttataactcttctaactgcaacgccatagcagactgaacgtgtaaatttacacgatttgaccacctaagtgaccacctaaatttatcggtattgactacctaagtggactacctaagtgaccacctaagtgcatttgttagaggaatagtgaaagacataagattgctgaaaggagggctagaagagctcataatcaacataggcggttatagaggataagtcctgctataaccgcctatttcaagcgtttgcgccctctgtaggcgttctatggggctatctcagcccttcagtgttcggatgtaacacataccgccttataatgccatccgaagcccgtcaatgtaacaccaatgtaacccaaatgtaacgcttcgttttgcaggaacacttgcctatcgtctccacgaacgtcccgacaatcagcgatttaaggggtattgatcggaggtatcattatgtacgcttcgttctaccccccttactttatagctcacgcctccctataccttatatacagcagcgccccatgatgccatctgcatcatggggcgctgctgtatatgcttgggggggagcttatagcttacggatgaggcttagcccgtcacgtagggggaggatgaggttctcgacacgggggtcgcgctgcacatagtcattgaaggcgaggatcgcctgcgtctgctggtcggtgggagtcggctcctcgatgaccttaccgtcccagagggtattgtccgctaagatgagggcgcccgaggggaggtgggggaggatgagctcatagtaatcgatgtactcgcgcttattggcgtcgatatacacgaggtcgaagctgtgcttctctaagagctcggggaggatcgtgagcgcatctccgaggtagaggtggacgcggtgggcgtagggcgtgccgtcgaggaactcgtggatgaagtcctccatctcatcatctgactcgatggtatggacctcacccccttcgccgagggcttcggccaagcagtgcgcagcatagcctgtgaaggtgccaagctcaaggactttttgggctcccgagatacggcagagcatctgaaggaggttgccctgcaggtgtccagagagcatacgagcacgcaggaggcgcacatgagcctctctccagagtcgctggcggtagggactctcaggggtcgtgtgacttaggatgtactcctcgagtcgctcgctgtcgatgctcattcgctgatggctgtttctggctcaggcatcccgagtatctcgcggatacggctggctacctgctccatctgccacataggcgtggaggtcgccccacagataccgatgctctgtggtaggggctggagcatctcgggctggatctcatcgggagaggagacgaagatacttcgctcgttgcccttctggcagtagctgaagagcaccttgccgttggagctcttgccccctgccacaaagaccgtcagctcgtgctgggaggagaactcctggatgtggggcatacggttggatacctgacggcagatcgagtcctggaagtcaaagcgggcatcaccgatcatacggctacggagcgtgtcgataagctcgtggaagcccgtcagcgactgggtcgtctgtgagaagagtgcgatggggcgggtgaagtcaatctgctcgatatcctcggggctctgcacgatgatggccttcccatcggtctggccgacgagaccattgacctcggcatggcccttcttcccatagatcacgatctgaccacccacgggatccagctcggcgaacttacgacgaaccttcttctgcagggcaagcacgacggggcaagtagcatcgacgagctcgatgttgcgctcacgagcgagctgatagatggctggtgcttccccgtgggcacggaagagcacgcgcttcccctcgagcttcttgaaggcctcgtagtcgatcgtctgcatgcccttggcctgcaggcggtctacctcctggttgttgtgtacgatgtcgccgaggcagtagagctctttgtcatctttcttcagctcttcttcggcgtgcttgactgcattgatgacgccgaagcagaagcccgactgttggtctatttcgatcttgggatacatgcgtggggataaggagtgggagaggaagactggactacgccttggcgagagcctcctcgaagtaggagcgcaggagggcatcctgctcgtcgtgggtcaggtgggagttgtcgaggacgcgtgcatcctcagcttggcgcaggggagctacctcgcggtgcgtgtcgatgtagtcacgctgacgaaggttctccagcacctcctcaagggtaatcttgctgtcgcccttgccgcgaagctcggcaaggcggcgctctgcacggatgacggggtcagccgtgacgaagaccttgagctctgcctgggggaagacagcggtgccgatgtctcggccatccatgacgataccgccctcagcgccgaaggcctgctgctgggcagtgaggaactcacgtacgaagcccagtgcggcgatggggctgacgaaggaggcgacctccatcgtgcggatttccttctcgacgttctcgccgttgaggtagagctcgggtgtggcgccttcgtggctctgacggaagctcagggatacctcgttcagggcttcgcgaagctctgcctcctggatcacgccctcgcggatgaagccgcgtctgagggcgaagagggtgacgcctcggtacatcgcgcctgtgtcgacgtagatatagtcgattgcacgcgcgagtgtacgtgccatagagctcttgccacatgagctgtagccgtcgatggccacgatgatcttctttgtcatgggtgttgtcttaccgttcgtttatcgtttgtggggtatacacccccttatcccaacacggggtaggggatgaaggtttttgtctgctataggggatagcttggggaaagtccttccggcggtcgcaccgctatatataatatggtatagggtgcgcagcctatctacctcactatggaggcggtcgcaaagatatggaattgcctgcacttatggcatatccgcacaagctttgtcgatatataagtggctgatgttcagtatagaattgcacttgagcttccccttttgagagcttatggaagggtgatggcttcgtaatcggggcgtgaagctgttggggtaaggctcggtgcaatagtcgttcgcactcaaaccaatagtggttcgatgtacgaacgaatagtggtttgcatacgaaacgaatagtggtttgacccccataccaatagtcatccgcatgcagaccagtagtcgtttgcaaatcgacttcttcagcttcgtccacgaactactatcataatggagccgaatagcccaagggcagagcgagcggtgaatacgccctataatatcagctttgccgaggggggcaaaacgaaccagtactggtcggcgaggtgaccagtactggtcactaatcgctactcgtactggtcacacatcgaagcagtactggtcggagcagtgaccagtactggtcgattttttgccttcgtaaagccttgattatgacacactccagagaggtgctaagtacccctatccctccgccctccttcctctacccaaaagccttacttacaagcaaaaagagagaatacttatacttagaaaattctataataggaatgaataagtattttttataagtttgaatcgaaatacatcgtccgaataccacgatgcacctcgagcgagaggtgcatcactcgctcccaccatgaagacgctttcgggagcgaacaccgtgccaccgcagccgagtggcatgtcgacataccactaatcaaattcacaaatcccaagtgtatgaaacaaacattcatccttaggtctctctgggtcggttggctactgatcctggcgatctacctggccccacagcttatggcacaggggctgaccatccgcggcaccgtagtggataccaaagatgagcccatcgttggagccacagtagtcgtgaagaagaatcccaagcaaggggctatgacggacgccaagggcgccttcaccctatcgggagtacagcgtgatgccatcctccgtgtgagctatctgggctacgaagctcgtgaggtagccgtagcagggcagacgcagatcaagatcacgctcaaggaagaagcacagcagctcagtgacgtcgtcgtcgtgggctatggcacgcagaagaaagttaacctatctggttccgtgactgctcttgacctgaagcaggtacaagctcgccccattcagaacctcagtaatggtctgcaaggtctcgtcccaggtctgaccgtcaccgctaccaacggtgctccaggtctcgacggtggtaagatccgcatccgtggtacgggtaccctgaacaacgcaaatccctacatcctcatcgacggtctcgagtctgggacgctcaatatgcttgacccaagcgatatcgagagcatctcagtcctgaaggacgctgcctccgcagctatctacggctcgaaggctgctaacggggtcatcctcatcaccaccaagcgcggtaagtctggtaaggctcgcgtcagctactcgggtagcgtgggtatgcagagcgctacgcgcctgatggaccgtatgggctccttcgagtacgctaccctctacaacaaggcgatggtagctgctggtaaggtagctcgcttctctgacgaggacctcaagaagttccaggacggcagtgaccccgaggggcaccccgatacccactggtatgatctggccttccgtacggctcttatgcagcaccacaatgtgagtgtcaatggtggctcggagcaggtccgctatatggcttcgctgggttacctcggacagtccggtattctccccaacgctaagcgtaatcagttcaatgctcgtacgaatcttgacctcaccctcagccgcctcatctcggctcgcctcggcctctcctacatcaagaataagtacgctgaccccaataactcctacgtctctggtggctctgatcagatcatccgccagctgaatatcgtcgcaccttggatcctcggccgtagtaaggacggtaagagctggggtacgacgggtgacggtaaccctctggcttggcttgactcaggtcagaccatcgaccgcgacaaccacaacatctctgctactgggggtatcgacttccatctcttcgatggctttaccctcacggctaacgtagcttatgtagccagtctgcagcactacaaggccttcgtccccttcatcaagtacaacgaccacaaggtgagtgcgcccaacaatctggacgaacgctattacctctggacgcgtgcaaacttcgatgcactggctaactacagcaagagccttggcaagaacaacttcaaggccctcctcgggtggcacgctgaagacttcttcacgcagtatatgcagggcaagcgtaaggactatccctcgaacgacctcaccgacctgagcgctggctcctcctctacgcaggagaacaatggtacgacagctcagctgcgtatgctctcttggttcggtcgtctgaactatgacttcgacggcaagtacctcctcgaagcgaacttccgtgctgacgcctcttcgcgcttcgctcagggctatcgctggggttacttcccctccttctctggtgcatggcgcctctcgaaggaagagttcatgaagcctctctatcctgtactgagcgacctgaaggtccgtgcttcgtggggtctcctcggtaatcaggaagctctcaatgactactatcctgcactcaatacctacaatatcggcgcgacctatcccttcggtggtgcgcttacctctggctatgcacagaccgacctcaagctgaacaatatcagctgggagaagagccgcaacgtcggtgtaggtctggacttcggcttcttcgctggacagctgactgggtcagttgacttctacgctcgtaagacgaccgatatcctgatgaaggttgacgtcccctctgagttccctctcaagccctaccacgctaatgtaggtgcgatggagaataagggtgtcgaaatcgcactgaactacaagacgaacttcggtgactggacgctcggcgtaggcggtaacttcacctacaacaagaataagatcctcaacctcggtgctaacgagtacatggacaatggtgctatccgtaatgccatcggtcactcctacgacacctattacatctacaaggctgatgggctcttccagtccaaggaagaagcagatgccttcgtagctaagtatggcacgcccttcggctctcgccctcaggctggtgatatccgctatgtggacgtcaatggtgacggcaagatcaatggtaaggaccgtatcttctctaatcctgtagatcccgcctatacgttcgctatgaacttcaacctgggctggcgtgccttcgacctctctgccatgttcagcggtgtcgcagctgcctctcgcctctacagctctgaggtcttcggtgccttcggtggggatacgggtcacccctctactgagtggcgtgatgcctggagcgcagacaagccctcgggcaagatgcctcgcatctacctcgctggtcaggctaaccacaacgaagcaagctcgaccttctggctgcaggacacgcattacgtgcgtctgaagaacctccagctgggttacaccctgcctaagagtctcctgaagaacctcggtgtctcttccctgcgtgtctactactctggtgagaacctcttcacgctggacaatatgcgcggtaacatcgaccctgaggccacgagccaccgtctctcctcttaccctctgctgcgtacgcactctttcgggctgaacgtatccttctaatgtgactacgataatgaacaacctatataagtacctgctggctggcctcttgacggctggtagtgtctcctgctcgggcttcctcgatacagccccccgcaaccagctctctcagaagaccgcttggaagactcccgaagacgctgagaagttcctcgtcggctgctatgatggctgggagagtggtggtacgatcctctacatggactgcctctcggactttggctttagcttccacgctcacgaaggcttccgctctatcggcaacgggacgatgagccccaccagcccaggtgtctccttctatggctatggtaccatcggccgctgtaacctcctcctcaagcagatcgaagagatccccaacatgcctgaggcgcagaagaagcgcatcatcgctgaggctaaggtgatccgtgcctataagtactttatgatgaacttcctctatggtggtgtacccatcatcgagctccctcagaatgctgacgaagctcgtctgccccgtaagaccgaggctgaggtacgtgcctacatcgctaaggatctggatgaagctatccccgacctcgaggctaatgtcacgcgaggtcgcttaggtaagggtgctgctctggctatccgtatgcgcgaagcgctctactatggtgactgggaggtcgctaaggcgaaggctaaggagatcatcgatctcaacgtctacagcctcgagcccagctaccagaagctcttcaccatcgcaggtcaaggctctgctgagatcatcgctgctgtgcagtacctcgagacggtgaagcctcactacacctctatcggctcgatgctcaataactctgtcgggggctggtcttcgatggtgccaacagccaacctcatcaacctctatgagatgaagacggggctgacgacggatgagtcgggctcaggctacgatgccacgcatcccttcaaggatcgtgaccctcgtatggctatgaccgtctgctacccaggtgcgaactacatcacgcccgaggggaagaccgcgatctacaataccctcgaccagaccctgcctggtgggaagaagaacgaggactatcccgaaagcgcgaacaacagctctaagacggggctcacttggaataagtacaccgctcctgctaatcagtatgcagacgtgtggtctacgaatgccagccctatcgtcttccgctatgctgaggtcctcctctcatatgctgaagctgagaacgagctgaatggtccttcggctgatgtgtacgctaagatcaacctcgtgcgccagcgtgcaggtatgcctgctgtcgaccagacgaagtacagtacgaaggataagctccgtgagctgatccgtcgcgagcgctccgtagagttcgctggcgaaggtctccgtcgtgctgacatccttcgctggaagggtacggacggcaagatgatcgctgagacggtcctcaatggtccgctgcagcgtatggtaggtactgtcgatatgacgggtacgaatcctgagacgcgtgctacgatcaatccctctgctcctgctgaagctaagctcgtggagaaccgcatcttcaagcctcacttccgctacctccccatccctcagtgggtcatcgaccgtaaccccaacttcggtaagaataaccccgactactaagcgcacagcttagctctatacaggataggccccccagctctcagtgagctggggggcttgtctttatctgtgtgtgatgacggctctgtaggggagggtggtgcgaacctatattggtcggcgggctgacctatataggttgctttctcgaccaatataggtcacgtctgcgaccaatataggtcagcccgccgaccaatataggtctgtatcacataggatccatctgcactcaagctgtggtatagagcttcgtctgtataggcgtagactcagggctctaccgctattaatcactacatttgtacgatacaaacctcacttatagatatacagtgccttatgaatgtacttaagacgctttctctcgtagcgctggcaggcctctcggggcttggctacgctactgcacaagagccccagcgagtcatcgctcatcctggggtcaataacgctcaccctgccgatgcgcgtagcctcaagtggaaggtcgccgtcgggcgcttctccaacgagacgcagtatggcaagggcatcttctacgagcgcgacaatgatcctatggcgaagcaggccctcgatatccttatgacgaagctcaacgcttcggggaagttcatcctcctcgagcgtagtgactcggagaagctggaggcagagctcaaggctgggcagggtcagcgtatcggtgctgactaccttatccttggctcgatcaccgagttcggccgcaagacgactggtcgggatggcctcttcacctcggagaagagtcagacggtagaggcgggtgtgagcattcgtatcgtcgacgtcgcgacggggcaagtcatctattcggaggaaggtaaggggcaggctcagacgacgagtaagagtactctgggtcttggcggtaaggctggctatgacgccaccctcagcgataaggccatctcgggggctatcgatcagctcgtcgagaacatcatcaataagtgcaccgacaagccttggcgcacctacctcatcaatgctgatgccgatggtatcatcatcgcaggcggggccgctcagggcattcgtcctggagataccttcacgctctacaagcgtggcaagcaagtgaagaaccctcagacgggtgtctccttctatctggcgggtaagcccgtagcacagctgcgcgtagagtccgtcgatggcgatacgcccgatacgcagtacgctatcgtcagtgtcgtctcggggagcttcgataagggcgccttagacaactattatgtacagcagtaagaccgcagcgattatgaagaagcaaccattctacaagcagtgggccgtcggtctgctctccctccttgccctcctcttcgctgggacagcctgcgggacgacctcgtcgatctcgggcgggctcaatgatgagtcttatatcgtcgtagcctcctcgagtgcctacgtcggcaagaaggtctttgtcttagtcgacgatgtctctgctgtggggatcgtggccgttcgccccgacgctgtcacgcgccacgcaaagcgtatcaccatcaccccagggcgccatacggtcatcgtccgagatgccgaggggcgcacgctcttctccaaggagatcttcgtctccagccgagccgcgaagaccatcaccgtgcagtaaatcgtagatcctcttttgcaactgatgaagttcacttataccgccgccgcactcctactttttacgggactcctctcgagctgtggctcctcaccagcattatattcgtggggcgactatgagcagacggcctatgccgtcgcacagaatcccacccccgagcgccttagggctctcggtatggtctacgagaagctcatcactcagcccgaaggcctgcgcaagatgcctcctccagggctctgcgcggagtacggctacctcttagctaagcaaggcgataccgagcgaggcgtaaagctcctcgagaaggaagctgagctgtaccccgagagtgccgtcttcgtccgtcgtctcatcaagcagctgaagaaatgaagatccgactacaccgagcctttatggccgtaggggcattcgcctcgctggtactcctctcctcctgtggacttctgggtgagcagacgcagcgccgtgaggacgcctatgccacgctctacagggagaatccccgctccatcgtcattatgcccacgatcaacgagaccaatcaggtcgagctgaaggataacttctacgctacgctgctcaagccgctggctgagcgtggctactacgtcttctcacccttcctcgcgaaggagctgatggagcaggagagtgccgccaatgccgaggacttcatccaggggaacgtcgcgcccttctaccgcgtcttcggtgcagacgccgtcctcttcaccatcatccatcgctgggagaaggtcgccctgcgctcgaagatcgagatcgatgtcgagtacctcctgcgctctacgaagacgggtgagatgctcttctcccgtcgcttcgagggcgctgtggatctgagtagtgaccaaggaggacggggcatcttgagtaccctcatggatatcgtcgtgggggcgatctctacctcgatgacggacaaggtcgtggctgcacgtctggctaaccgcgatgcgctggagagcctccctgcaggtgcttaccacccccgatatctccaggataagcgcgaacaagtcggccccacgcacgtcacggggcgtaatctcaagtagcgtgtaccatgggctccacggtacacctcttagtcattgacaaccgcgactccttcgtctataatgtcgtggagctcctgcgctcactccccgagctcaccttcgaggttatccccgagggtgagctcgagctctcttcgcttcccgagcacgatgggctcattctctccccagggccaggcgtgccgagtgagttcccccgtatgcaggctctcatccgtgccgaggtgggagtaaagccgatcttgggtatctgcctcgggcatcaggctcttgccgagcactacggcgctgagctggtgcagctccctacgcctcgccacgggcatgcctccgcacttgttgtagcagatcctgcagatcacctcgtcggtgctatccccacgggaagcctcgtcgggcgctaccacagctgggcggtcgacgaggcgagcctcccgacttgccttgtcccgacggcttattgcgctgatgtgggtgaaggccgtgtgctgatggcgatgcgccaccgcacggagcccgtgtggtcggtgcagttccatcccgagagcatgatcagtgagtatggacgtgcctacctctcggccttcgccactgccgtccgtgcttggcactgatagcccttcccatccatctacatcctttagcctatgtacttcagagatattgtcggtcacgatagcctcaaggcacagctcctcacgacggctcgccaggggctcgtccctcacgcccagctcttcacggggcgcgatggcgagggcgctctgggcttggcttacgcctatgcccgatacctcaactgcaccgatcgcggggaatgggacgcctgtggacattgcccctcctgccgtcgctatgacgaagtgggggatcctgacctctccttcctctatcccatcgtcaacgcttcggggaagaacctctgcgaagaccatatcgaggactggcgacgcttcatacagcagggcccctatacctattacgatgaatggctgggactcctcggtggcgatgggaagaaggcctcgatctttgcccgcgaaggcgagcccctgcagcgcatgatgggctatcagacctcggggcgcggctaccgcatcctcatcatctggctacctgagcgcatgcaagaggcgctgggcaacaagctcctcaagctcgtcgaagagccccccgagcgcaccatcatccttatggtcacgatggacgagccgtccgtccttcagacgctgcgcagtcgtatgcagacccttcgccttcgccccctcactgagcccgagatcgagacggcactacgggcgacccagacggactatgccgaggcggatgccctctacgcagcccacctctcggagggcaactaccgcaaggcactcgatctctacgaaggtcgtgccgctgagctgggcgaggaatacgcccttctgcagcgcatcctccgcgcgacggtcaatgcgcagccccgcgagatgaagctccttgtcgaagacctcgcggcactgtcaaaggaagagcaagcgagcctcttggagtacttggcgcgtatgttcagagagttctacctctacaatctctccctccccgacatcaattacctcacgagtcgggaggaaggcatcgcccgctacctgcgctcctgcatcacggggcgcaacgtccgtcaggtcgaggccgagatcgatgaagccgcccgtcacttagcgcaaaatgtgcaggcgaagatggtcttctttgacctcatcctgcgcctcacttcgaccctcgctccaagctacaagcaggcgggggtaaggtagtttttgtgccttctccctaatcgcttcttgtgtagtggattaagcctccttccgcagaggacgaaatttccttgcggaaggaaataaattttcgtgcgcacgaaaatatttttttgtgcgcacagaaatttccctgcgtgcgcacggaaattttgcgccctgcggaagaaaaaagacattcttccgcagggcgatcttttttttgggatggagccatttcatttgctcgcagaagctgtttgtgaagtgcgggcaaaaagaggaagaggtcggggtcagttcggcttggagtgtacgcgctctttccttagagcgtagtaggtgggacaacgctggagttccaaaagcaggtatataaggggacgattgagcggataaaatccccttttttaggtatttcaaagggaagggagatactatatctttgcgggcgagattgcctaggttgctggaggaatatactcatctccacgagacacgtaatattatgtatagccttttatctgaactggagaaggctagggagtgcgtgcgcctagagaacacataaggataacacctatcattaaagatgtatcatatagctagacgactagccattacactaagccttagctcggcgatcctgggagcgaaggcacaggtagccccgacagatagcctcggcgaaacgaggagagactccgtccgtcgacttgacgaggtcgtggtctatgctcggcagatgctgggaagcaagttcgaagctcgcaaccgtacgggttcagcttattacctttcgccaaaggaactgaagaagttcggctacacagatatcagccgtatgctacgtgccgtgccaggcgtgaacatctacgaagaagatggctacggcctgcgcccgaacatcagcctgcgagggacaaaggccgagcgcagcgaacgtatctcgctcatggaagacgggatccttgcagcccccgccccttatgcagcccccgccgcctactacttccccaatgtcgcccgcatgtacgccattgaggtactcaagggaagtagccaagtgcagtacggtcccttcaccacggggggcgctgtgaatatggtatcgactcccatccccaagagcttccaagcaggcctccgtacttcctatgggagcttcggtaccttcaatacctacgctcatctgggtagcgaccacaagcatgtcggttacctggtcgaataccttcgctaccaatcaaagggatttaagaaggatgagcccaacgaacgtacaggcttctaccgcaatgatgtcgtcgggaagctccgactacatagcgacgaggatgcagagatccgtcaggcactcgagctgaagctcggcttctcgaacgaacattccgatgagagctacgtcgggctgagtgagcaggacttcgcctcccgcccctattaccgctaccgtggtgcccagatggaccagctgcagactcgccacacgcagacagccttgacccacctcgttgacttcacgggcgggctgaaggtgacgacgagtgcctattacaattacttctggcgcaactggtataagctcaacgacgtgtgtatcggagatcagaaaggcgaaaagcgaagcatcgaagagatcctcgctgaccccgagaccaatgcccgctacatagacatcctcactggtgccaccgaccgccttggagaagcgcttatgcttcgagccaaccagcgctcctaccattcgcgtgggatacagacgaaggtggagtatcgcctacctttcctctcgagctacctccagttggaggctggtgcccgctatcataccgacttagaagaccgcttccagcacgatgatagctactccatcgagggcgggaagatgagcctcttccgtgcgggccaacctggctcgcagagtaaccgcatcacgacagcccatgccttcgcatcctatctccttgggaagtggtcacgggcgggatggaccatcaccgctgggcttcgcctcgaggacgtagagctgtataagcgagactatacgaccaaagacccaagacgcacgggccacctacgcatcgagggaagcaaccacgctacagcactccttcctagcctcgggatcaactatcgcatccttcgtcccctctccatattcgctggtatccatcagggcttcgctcccccaagcgtgatgacctactaccagcagaagcccgagaagagtatcaaccttgaggcagggatacgcctcactacagaggatctgaaggtagaagcgatcggctactacaacgactactccaatatgcttggcagtgacctcgctgctgcgggcgggcagggtacgctggatcagttctccgtaggagcagcacgtgtccaggggcttgagttcttagcctcttggcaacccctgcctaagagctgggaggtacgtcttccccttcaggtcagctacaccctgaccgatacccagatgaagaacgagttctattcctccgcttggggggaagtcttcgcaggggatgaactgccctatatcttccgacatgcagcgaatgcgcagctcgggttagagtacaagtggctcgaggcgaacctcagcgtccgctacaactcggacatgcgtactgctccagggcagggacgtatcgccaaggcacatcttatccccagccatacgatcatagacgcatcactcaaggcacgcctcaaccgccacctcaccctaagcctcaacgctgtgaacttagcgaacaaggtctatctcgtctcccgtcatccctctggcctcagacccggtcatcccttcggcatctatggcggagtacgtatcaacctctaatgcctcttagcaagacatgaagcaatcacttagatacatcatacgccttggtctcctgctcctccttgcccttccctttagtgctctggcacagcaagcgaaccagatcacgggcagtgtacgcagtagccgtggcgaagccttaataggagccagcgtacggcttgtggggacaacgcaaggcacgctgacggacagcgtagggaagttctcccttaccgcccgcataggagatactctactcgtgactagtgtgggtatgcaagctaagacagtgaagatccatagcacacgcctcaccattatcctcgaggaggacaacaagctcatcgaggatgtcgtcgtgacgggctatcagaagattcgcaaccgagtctatacaggtgccgcctcatctgtgaagatgaaggacatccaccttgaagggacgcaggacatctctcgtatgctcgaaggtcgtgtcccaggcttatccatccagagcatttctggtacattcggtgctgcacctcgtatcaatatccgaggtggggcatctatactaggtaatgtacaacctctgtgggtaatcgacggagcggtctatgaagacctcgtgcaccttagcctcgatcagctagcatcgggagacgcagcgacgctcatcagttcggctgtctcagggctcaacgcctcagatatacaagatatacaggtgcttaaggatgcttctgctacctctatatatggagcacgcgcactcaacggcgtgatcgtcgtgacgactaagtcaggacgtagagacacacctctgagggtaagctatgccacggagaatactatgcgcctcagacccagctatagccagtacgacctattgaactcacaagagacgatgggtatctatgaggagatgcgggaaaagggctacttcagtctggctagctcactctacggccgtcgtggtggggtataccatctactcaatagggcgctctccgagtacgatcccgagacggggacctataagctggagaacacaccgggggcacgtagatccttcctcgagcagcacgagcgagccaataccgattggttcaaggagctcttccgtctgacacctacgacgagccataccgtgagcttcagtgcaggtggacggagtagtgccacctatgcttcgctgggcttcttctatgacggaggctggacagtagcagatcgggtacagcgcatcacggccaacctcaagaatactttctacctcggagatcgcctgcaggtcacactatccgctcaggggaacatccgctctcagaacgcgccaggcaccctgcctcagcgcaagaatactacgctggggctcttcgagagagacttcgacatcaacccctttagctatgctctgggtacgagtcgtacgctcctaccgtcggagcgataccgcaacaactgggcacctttcaacatccatcaggaataccgctccaaccacatggacatcggggtgctcgacttcaaggctcaagctgaagccagctacaaggtcctaccacatcttgaggcccgtgccctcgtctccacccgacaggcatatacctctatggctcacgagatcacggagcgatctaaccaagtccttgcctacagagctatggagactcctgaggtcggcgctgcgaacatctacctgctacgtgaccccgagcatcccgagcgccgtcccgaggttgcactgcctcatggggggatactcaagaaggatgagacgagcctgaagagctacctcatgcgtctggctttggactatgaccgccgtataggcccccatgatatcaaggcctttggcttcactgagatccgctatgccgatcgctcgcatactcccttcacgggctacggtgtgcagtacgatcgtggtgggcagatcaatacggatcctcgcatatttagtaagctccttcgtgagggggaggattacttcgcttactctagacgctatgaccgaggtgtgacgttctctgcgagcaccacctacggctacgacgggcgatatatcctcaatgccctgatcaatatggaaggctcaaatgcttcggggcgcaacgctcgtacccaatggcttcccacgtggaatgtcggggggaagtggaacgtcgaccgagaagccttcttccatccctcttctctactctcccgcctagctgtgcgcatgagctacggactcaccgccaagatgaacgaggaagctgtcaatgcgaactcagtctaccaaggtgggactaccttgcctcgtcgctatcaggaccgagagaatgccctgcgcattcgccacctagagaaccgtgacctcacttgggaaaagatgtacgagctcaacctgggcctcgagacagtttgggcaggtgatcgtgtacgggctacggtggatctctaccagcgtaatgcctttgacctcattgaccttgtccgtacctctggtatcgggggccagtactacaagtatgccaactttggggatatgcgcacccaagggatcgagctctcactcagcacgacgaacatagagacaaaggagctctcgtggagcagcagccttaccctcagcctcatgaaccagaagatcacaagactgcgtaatacccccaatgccctagacatggtcgctggacgtggtcgaggtaatctcgtaggctaccccaagggttcgctcttctcctacaacttccaagggctgaatagtcacgggcttcccacctttgactttggactctatcccaccaatcatggtgaggatgccaacgtctacagtgcagacttcagtgacacgcagtacaccaagagctacctcacctatcatgggcctatcgagcctcaggtcatcggtgggctatcgaacaccctgcgctacggtctctgggatctcaccctcttcatcacggcgcaggcgggcaataagatccgactcaaccccacctttgaccccacctttgctgacctcaatgtcttctcaggagagtaccgcaatcgttggatgaatcctggggacgaacagcataccgatgtccctaccatcccttcgcaggatctaatcaatgctgtgggtagggagaatattgagcgtgcctatagcacctacaactattcccagctacgagtcgccgatggtagcttcgtacgtctgaagcatgtctcgctgggctatcgggtctccgaagccttcgccaagaagcttcgcctgcagtcagctaagctacagcttagtctgacgaaccccttcctcatctactccgacaagcgtctacgtggacaggacccagagtattatcgtgcagggggggtatctctacccactcctagacagtacacgctctcgctacagataggattttaagacaggggcattgacccagacgtaggtacacctcgggacttccaatagaaactccttagaggcaacaatagatactctcctgaggcaacaaacgaacctcaagcagggtctaccttctacttcaaagtacgtatagataacgatgataaagcgatcactactactcgtctccttagccctcctgctcggtggctgtcagggatacctagataagaaccccgatgccgctctagacatcagtatagacaccgaggacaagctacaagagcttctcacgggagcctatcccacggccagctacatccccttcctagagccccgtacagacaatgtcgaggagcgcgtcaatggtattcagtcccgcctaggggagtccatgtacctctgggaggattacgaccaagaggatctagatacaccgctgagctactggcgggaatgctaccgagggattgcccaagcgaataaggtgctggagcttctctcgaccttccccaagaatgagcgcacacgtgctctctatggcgaggctttcctcctaagggcttacctgcatttcatgctcgtgaatatatgggcagagccctacggacgctctgcatccagccccggcataccctatctaaccaagcccgagaagcacgccttcgtggactacaagagagggacagtcgaggaggtgtacaccttgatcgagcaagacctcaagagggggatctccctcgtctctgaccgctactatcagcagccgaagtaccacttctctaagcgagcggcctatgccttcgcctcccgcttctaccttatgaagggggactggaatcagtgcatcgcctacgccgactacgtgctgggcaattctccaggagtgactctacgtccgtggatcagctatcaggaacagctagagggacgcagggagcgactgcacgagatctactgttctcctcagaccgcggctaacctgatgcttgcctctacggagtcccgtctctcccgctcgatcgccaccgatcgctatggggcgactgtgggaatcgtagataagatcttcaagcgaaagaccatcaaggatgacgaccaatcaggagatgcgacccttatctaccccttcgtttatgcccctgagccctatcgcacgacacgctatctagctaagttcgacgaacgggctacccagcaggagacctcggaggtacacccccgaggattagcagtgaccaatgtcctcttcaccacggacgaagtcctactcaatcgtatggaagcctacaccatgctaggcgagtatgatcgtgccatcctagacctcaaggcctacaccctgagtaagctcggctacgagccagctgtcccgaatgatagctacacgcagggctctacctccaactatgcgctctatgctcccttctatggacttacggttcgtcagctgccgatgatacgtaccatcctgcatctacgccagatggagttcttcgaggaggggctacgttggtttgacattagacgcttcaacatcgaggtcacacgatcctctaagagcagcttctatcgtcccctcaagaaggacgaccctcgccagtgcctccagctccccaccgaagccatcaccgctggcttagagcccaatccaagggagggcaacaaccatcgtatacgtcactaagcataccccaacgatgatgaaacaatccatatacctcaccctcacacttgtcctcggcttggccctagcctcttgctcgaaggatcagctcagtgaacggagcgtcttgcctccactgagcgagcagcagagcgagctagaccgctggtgtcaggagcatattactcgcccctaccaagccgaggttatctatagatgggatcgcaaccatgcggagcgatctacccacacctatcccccgcgtctggagcaggtacgccccgtactcgaagctctggaggcaacggtactcagcctctaccgagacaagcagttcttcatcagcagtgacttcatccctgcccatcctctactgcgcatttacctctacggtggtgccaatagagacggacaaggcgtagatctgctcttcaatcgcaaggccccctccatcgagctatacatatataatgtagacaccttctctcccactaatcccgtggaggtgtaccgcctcgtccgtagtgctcagcatcagatcggccggcatctcatgaccattcatccctacgaccatgaccgcttcctatcgttggggtctaaccgctacagctcgaccacagagcccttcgccgatgcctatcgtagctatgagaagtcggggagacttagagaagggcttgggctgaataggtacgcctacagcagaggcttttactccatcctcgggatgctgggtgcacgcgaagacctagcagagatgtacagcgtcacactcaccgagaccccagcggccatcactcgagcagagcaggatgctgctatccctgatgacgcagacggcgatgaggaggccaagcgtcgctatgccgaggaagccaagatcgctcatgagaccttcgtccagaaacgtgccttcctctccaagtacatcgaggaggcttggcgcatacctcttcaacgcctccagctacagagcctccagctcatgaaccagtatcttgacaagcatcatgcgacacagccttagcctcaccttcgccctagcggcaagcatactactaggggcatgctctagggataatcaggtcttccccaacacacctaccgagcgaagccttgtacgacaagactcgctaagagaggtattagtctccgctccccaggggtgggaagtcctttatttcccgaagacagactccctactcttcacgaacccgaaggaggagatcaaccagcataagttccccaaccaactcggttacggaggcttctactatcagatgacctttcacagggatggtactcttgacctacgaggagactacaccgatggctctgccaaggccgtccaaaagtctacctatgaacttggtcaggctgcctatactcgcctaagcttcacgactggtagctacctcaccgagctgatcggagagcgctacgagggggagctagacttcctcttccgagggacagacgctgatgggcaactggtcttcgagagccctcgtacgacgaagcctgcatactcctacttcatccttcgtaggatcgctaaggatgcagaccgctcagctcgccttgagagagccgagggacaccgcatcgcctttgagcaaatgcgcaaccctcagatacgtatccatcagggaggacgcacgctcttcctgagcaactatataatgaagtacagcacgaggaatgagctcacctcctatggacgcaacctcgtcgcccagcggtatgcactcttcacggctgtgagccgcaaagccttgattcccgatggacctccccaagggatcgtggggctgggatcaggctatgtcggtacccccgaggggctcaccttcctcacaggtatccgttatagttcgaagtacatcttctcggactttgagcgcaagggagaccgcttcttcgccgaacttgtcgaggtgtacgatgctccctaccgcacgagacgtttagtgagccgtcaccttcaccccgagggggtagagacgggcatcatcgccgagctctacgatgatcccgatgccactcatgattactactaatgtgatcaccacgatgaatagacttctaaagagcctcgtagggctcacagctcttgccctcgtaggatgcaagcataccccaatcgactatcccgtggaggactatgataagctcttccccttccgtggggtagagcgtccagacggtcgctatgaagatatgacgatcctctcgggcaaccccgagacgactcccagcaccttcgtctatccaggggtgacgcttcctggcacacctcgcacctaccgagtcaccttgacctattccttcagcgaacctgcggatctccatcaaggaggcttgcgcaagcagagcgaagtgcgctcacgctgtgtcgttcgctatgtcggggcggacaagctgctgcatgagctgggtacggagaagacctttcagggcgccagcttgatcctcaacgatgggaaccagcatacccagacgctgacgcttagctctggtcagccccttttcctcctcgtcaatggcactgctgcccgtggctccacgatccacgtctccctacaagcggtctccactgatggcatcttcgccacaccggtattagagacacgccagacacagaactacgatgagggtgaggcacgtctgcccgctcccttctgcaagtacattatacttccttagtgcaaatgaagccttatacctcaagccgctcttgggcactcctcttggcactcaccacgcttacctcagcctgctcgcgctgggagggtgaggtggttgagagccagtaccaggctccactcgtccccgatcctacctacaggtttcagcgtcagggtacgagcagtgtagacctactcctacctcagcaagccgcctctgcctctgagacgctttactcacgattccttcgcacagcctatatcctcaatggcgcacgttggcaggagctcaagcagctctttgcccaaggggggaacaatgagatcgccctagagcccctcattgcttcctccgctcagcagagtaagtatcgctcggcgatcctgtcggacttcgccgagacccttgacgatgtacgcagggcggctggctacgatggagatacgtatgctaccgagcggtacaaccgaagagccagtgctgggcagacgggattcatcggctataaccaaggggacaacgatcgcttcttcgtcactgccgatggcttcgctccctcggaggtttaccgagggatgaccttaggtgccgtgtacctggacaaggctcttggggaataccttgacgagaagttcctcaccgacaagacgcttatccaggcacacgaagccccacagctggtcccagggcacagctatacggcgctggagcatacgtgggatctggcctacggctactacctacaagcccagaagctcctccagtccaacagcctcacgggactaaagggatcggagacgaagctcttcaatgcctttgcccttggtcgcctcgctatcactgagtatcgctacgaggaggctctgtcgcacctgcgcagcatccgtacgctactagcgcaagctgtcgctgcccgagccctagaggagctcgtgggacggaacaccctagccaacctcaacgagcgccccgaagatgccttccgcttcgtctcacgtggtgtcggctacctctacgccctgcagttcactcgtcgccccagtggtgagccctacctttcgctcgaagaggtcaagcgtctcatcgcttccctccgagcaggcgaagggctgtggaagagctcgctcagggagcgcctagaccaagtcgctcgcagtatctcctcgacctttgcccttagccttccctccaagggctaagctctcctatataccctaagatgattcctataaccagacaatgatacagattagattcagatatgccaccctggcacttgcactcctcttagggagtgtgagcctatgggggcaggtgaaccgcaatagacctacgactcgtcccgagacggtaggggcaagtattctgcccaatggagggctcgaggatcctgctccttccacactccctcccgtgccttcccgcccaagtgactaccccgaggaatgtatcccgaggacacccgacgatgtcttctatgaggacgaagaagagaaggagggcggtatctatgagaagatcatagagtacggcgaagagcacgggatcgaatactctgacgagcagatcgcccgcttcaaagcctacgttgatgcgtacgtggcctacctcaaggccctacagtcctttgagaaggctcgacccactggctggtggctctacccctcgcacagctctacatccagcaaccagtttgcccgcaccttcaccgaggcacatggcgggaaggcggcgatgaggatcttgggctacttcagcgtcgatcaccagatatacacctaccccgatccccttcccgtccgacagaaggctaagtacctcgtctcttactggtaccgaggcaacctccccaagtccgacggaggagccaatcgcctagctgccaagctcgctgtcgtccggatcacgtggatccccaaggcgggtaaggtactcatgctcgaaggcaaggaacttgctcccgcagggaagtcttgggtagacgctcgggaggcacagaaggagcacgccaaggacggcttcttcaatcagctcatcggcatggaccttagagggagcgagatgaagacgtggagagagaagtacatggtcgtcgaagcccccgagaacgcagagaagatgaccttcgagctggtgttcccacgcaacgagagcgacatcgctaactacctcctcgaatttgacgatatctccatgaccgtgatcaagggtgccgaaggagaggacgagcctcagaagcccaagcccaacgtccttgctcctccgacgcgacttccccagccttatctccagcgggagtgcaacctcacctggaccgctagcgaactgcagggcgctacctacgaactcgagctggtacagaagcgagggaagaacgtcctcagcacgaagacgctctccacggacaagacctccttcttcctcgaagggctcgagccaggctacacctacacggtgcgcctaagagcgctagccgatggggagtactccgattactcgctcccgctcaccctcgagacgcaggggcttggggaattcccaggtggggaaatccccttcctctactggatcgcagaagatggctcttgtccgcagcgcctgcctctgcactacatggagctacggaatcccgaggcgaagtgcctctattatattgacgatgtgctgaccgagcccgaggggcgcatcctcgtcttcccctccacgggcgaacattcgctccgtgtccagatcgtagaggctcccgagcgcacttgggagctggagtacctcgtcaccgtcaagtaaagcctccgatgaaaaagattctattcctacttagcctcgtgctcctcgtcgcctcttgtcgcaaggagagcgaccgcccgatcctcccgctacgtcttggtgaggaggatgccaaggaactccagcttacccagtccgagacacggatgctcctactaaagggcggcgacgggaagtacaccgccaccatcgaagatgcccgcatcgcctcctcaagcattagccgagacacgcttcgggtctcggggctactctacggtgagacctcacttaccctgcgttctcacgacgaagtccgtcgggtgcgggtgctggtcgtccctcctcccttcgcttcgaatgaagatgccgtgacgctccgtccaggcgacgacgtgcagacgcttagcctctcggggggaggagcacgtgcgagcctcaaggtcgaagaccccgagaaggcggcggacatcgtctggcaagccgagacgggtctggtcaagatcaaggccaagtacgaaggggacatcaagctaatcgccaccagcgaggaccgcaagacgactaaggagatcctcgtcaaggtccgctgtgccggatcggccgaccgcttcggggtctacatgaccaattcgcgccaactgagccagctcttcccctgcaggatcatggctcggctcaagggaaagtcggtacgtttcagcgagagcgctatcccagtgctgcgcacgaagaagggcttgacccccgagtcgcgagtcaaccgagtgctcacgctcacccccgagatcgtcgcccccgtagttggcgaggcccgcaaggtgaagatcgactggcttgacgcaagcatcttctacaaggaacatccgctcaagcgtgagggagaatacaccgtctacgtcgaggaagtacgggatcgccaagtcgtactccgagggcgaggcttcaagatcgtcgctccttaccgcaaggactagccccttcgcatccagcctcaccgctgggtatttccctacgaacaagctccccgcctaatgcagatactgttaggcgaggggctctgtttttctctccacctcagctcaaaagcaggcgttctcggaggggcaagggacgtttcttttgctcgaagtgggagctcttcccgcaaggaaaggaatcgctctacggaagaaaatttgcttccttccgcagagcgaaaaaattgcgtgcgcacgcagggaaatttctatgcgcacaaaaataaattttcgtgcgcacgaaaatatttttttgtgcgcacggaattttgagcgctttacccaagcgctcctttccctatgtcctttaccttctttttcccttgtgaattgccctccgatcccagggggggctacctcggggtactcgccctccagcggaaagcccttcagcccatcgggggatattgccctataagccgtatctttgcattccacaagggcttggtgggtcgcatcccactctcaaggggcgagccttccaacgaatcaacgacgacgatgctaaaattcgatatccataagacttgtactaagactgccgcgcgcgctgggcgtatagagactgaccacggggagatccttaccccgatcttcatgcccgtcgggacggtcggctcggtgaaggctgtccacatgcccgagctgagtgacgacatccacgcacagatcatcctcggcaatacgtaccacctctacctgcgcccagggctcgataccctgtacaaggcaggcgggctgcataagttcaatagctggtcgggctcgatcctcaccgacagcgggggctatcaggtcttcagcttggcgcatcgccgtaagatcacggaggaaggggtgaccttccgctcgcacatcgacggctcgaagcacctcttcacccccgagcgtgtgatggatatcgagcgtatcatcggtgcggatatcatcatggctttcgacgaatgttgccctggcgatgcggacttccactatgcgaagaagtctctggcgctcaccgaagactggctgcgtcgctgtgtgaagcgcgtcaatgagaccgacccgcactacggctatcatcagagtctcttccccatcgtgcagggctgtgtctatcccgagctgcgtacgcgagctgccgaattcgtggcttcgctcggcgctgaagggaacgccatcggtggccttgccgtcggggagccaacggagaagatgtacgagatggtcgagctgaccaatagcatcctccccaaagacaagccccgctacctgatgggtgtcggtacaccgatcaacctgctggagaacattgcccgcggtgtcgacatgttcgactgcatcatgcctacccgcaacgggcgcaacggtcagctcttcacgagctacggcacgatcaatatccgcaacgcgaagtgggcgcaggagttcagccccatcgatcccgagggtacgtccttcgtcgacaagcagtacagcctggcttacctgcaccacctcatccgcgctgacgagatccttgggctgcagatcgcctcgatacacaacctcgccttctacctgcgtttggtacgtgaggcccgtgagcatatcctcgcaggagacttctccgagtggaaggataagatggtgcgtcagctcaacaatcgcctctaagcccacccgagtacgtcatgagtaccactccccacgaagctgaagagctccagcaggagccgatcaccgatcaggtcgagcagaccgaagcgcccgagcgtaggacgcctccgcccgtgatgaagaagccgtaccgcccttggctggggcgggtggactggtacatcatacgtaccttcatctccacgttcctcttctccatcggcttgatcctcgcggttgcagtggtcttcgacgtcaatgataagatcacggacttcctcaagccagaggtgccgctctcggggatcctcttccgctactacctcaacttcatcccctactacgcgaacctcttcagtccgctcttcgtcttcatctcggtgatcttcttcacctcgaagctggcagcaaactccgagatcatcgcgatgcttgccagtgggatgagcttccgccgtctgctccgcccgtatatggtctctgcgacgctcatcgcactctcgacctacgtgctcaatggcttcatcatcccttcgggcaaccgtgtacgaattgacttcgagcagacctacctcaagtcgcgccacgaggtctacacgaacaatatccagatcgccatcgcgaaggatacctacctctatatccgcgactacgagagcctgtcgaagcgtgccacgtcgctcgccgtggatcagttcaaggggcagaacctcatctcccgcctgacggctgacgaagcgtactacgatacgctcgaccactggaagctaacggacttccacatccgccgcttcaagggccttgaggcgaccgacacgattggctatggcttggatacgaatctgcgtatcagccccgctgacttcctcgtcaatgagaaggacgctgtgaagatgcgcaacgaccagctctcacgctacatcgaccgtcagaaggagcgtggcgcaagcaacacgcgcctcttccagacggagctacacaatagatatgccgcgatcttctccgccttcatcctcaccttcatcggtgcggtgctctcggcgaagaagatgaagaacggtctggggatcaacctcgtcattggcttcgcactctgtctggcatacatcctcgccacctcgctcacttcgcagatcgcgaacgtcgggctgatggctccatggatagcggcgtggataccgaacgtggccttcatcatcgcagccctcttgctgtggcgtaaggccccccaataactacgactcagtatatgaaagaaaagatacagcgcgccgtctcgatacagaatcgccgcgcacgcttcgactacgagctcctcgatacctataccgctgggatggtgctcgtgggtacggagatcaagtcccttcgcctggggaaggcgagcttggtcgatgccttttgctacttccacaacggagagctgtggctcaagggcgccaacatcagcgagtacttctacggctcgtacaacaatcacgcggcacgacgtgaccgcaagctcctcctcaatcgcaaggagcttcgcaagctcgaggcttatgtacaaagccctggtgtgacgattgtccccgtgaagatcttcatcaatgaccgtgggctggcgaaggtcgtcatcgcccccgctcgagggaagaaggtctacgacaagcgcgccacgatgcgtgagcgtgatgatcgccgtgagatggaccgcgctatgaagcgctaagaatagccctgacgtatgcagaagatatatgacttcatcgcccagcgcccctcgggtgaactggtgcgtctctcacagttcgcaggtaaggtcctcttgatcgtcaatacggcgagcaagtgcggattcacacctcagttcgcaggcctcgaagagctctatcagcgctatcgtgatcgtgggctggtgatcctcggattcccctgcgggcaattcctcggtcaagagcttagcacgggcgaagatgcagcttccttctgctcgctcaactatggggcctccttcccgatgatgaagaaggtacgcgtcaatggccgctacgaagaccctatcttcacctacctcaagcgcgctgcacgcggtacactcacctcgtgcattaagtggaacttcaccaagttcctcatctcacgcgacggtagtcgggtcctgcgcttctctccgatgactaagccagagaagctcgctccgctcattgagcagcttctggcagagcagcccatagacctcgaggactaagcctcacctatcctataaggcagccgcccccgccacccgtgcaatgcttgcacttcgggtggcgggggcggctgtttttccttgtgacataaggtgcttctcttgatgtgtgtgcgaaaaggaactgagatggggggaaggaggtatatagcttcgtgagctttcttccttaggtacgtgcagtattatacgcttgaagatggatatttatacgattaaattatggaattaatacgtataaattgggcaattaatacgtattaattggtagatttatacgtattaattttcgctctcactcgtataagtcgtgggtatcatacgtattatctttcacaatactccttaggagatgcgggcatccagctgtggagcaaacgcaaagggcgaatgaaaggatgagtaagtcctttcattcgcccttcgtaatcctacacgcagtttgcaaggaaaatactctatgaggcttcagacatggaaagaaggctggagaagaattacaagagtaatagaataagataaaggcaataagcgcatattgctgactggataacggcacttgagcagagatatatctgtttcaagtgccgttcgtttattgctaagttattgtgcttggtcattttttgattctgcggcaaactgtcctcctttatattcttctttaaactctgtaactgtctgtcccgtttgttttttgaagaaacgcattagatgtcctggctccgagaaattgaattcgtatgccaattcactggtggttttgttagtgaagagtatttcattcttgatttctgcaagcagacgttgtttcagcagatgtgcggacgtttgtccatattgagcctgtacagaggcattcaatgtgatgcggctgatgttcagcatggctgcatagtcagccactcgctggtattggtgaatatgtttttctaagagttgtttgaactcaaaggcatggtagttcttgggggtatcaaaaggcagatggtactgagtggaatacctacgattaagagtcatgagcagataatgaagtaaggatacgatgatgtgatagctgtcggcaagaggatggctgagttcttcttttatccgtacaagcaaacgctcgtattcttgttgttccatagcagtagccgacagatggggtgggaaatctgtttggtagcaataaagcaaacgataagtaaagaaaggatcggcaagataggttgaaagaaaatcatcacggaaaacaaggaaacgataatccatttggctttcatcaatatgccactcctgatggatgtgcggcgaaagtatcagcaccgtattgtctttcaacgcgatatgttgaaagccataacgcacccatccggatgctttcctgaagaaaaacaactcgaagaagttggttttgaaagacggatactccatcaatacgccccgcaaacgctcgtgtgtatcggtattgatgttgaagtctacaccacattctgttttgctgaaagggacttgagtaagttcttggggatgaatctctgatttcatgtgacaaatgtgctaataaatgatggtttatcaaaatggtagaacatatattgttaatggtagaatgtgcctttgttctgtgcgctacctttgcactcgtaatcaaagcaaatagcattatgagagaaattcaaatcacagaaaagggcgagaacttcaccacggtgaacgtaggtaagttgaatgaaattaaggaatatgagttggctatgggcaatttctctattccgggaaagatgtttgccggacatgcactacgagcaacaggtgcagaattgtctttccaaagtcttgcggcaggtcaagattatggcacacgccatgcccataaaacccacgaagagctttatttcattcttaaaggtgaaggcgttttcgatgtagacggcaagcgatttcccgtttcagagggaagcatcgtgagaattgcccccaatggcaaacgtgcattcaagaacacaggtagcagcgaaatgctcgtgctttgtgtacaatataaggcaaattcgttctcagatgatgatgagccactgagggatggtattatgctggaagccaatgttaaactttagttgtaataagcaatgaatatccaacaagtaagaaacgcaacgataatcgttgagtatgggggaaagaaaattctgattgatcccatgttgggaaagaaaggctgcatgcctcctttcccctttagtagaaatcaacacctgcgcaacccacttcatgaactaccttttcccgtagaagaggtgttaaaaggtgtagatgcggtgttgcttacccatctacacgatgaccatattgatgaggcggcctatgaagcgatgcctaaagatatgcgacttttggtgcaggacgaaaacgatcggcaggtggtgatgtcgcatggatttaatcatgtggaagttgtcggcgacaatacaaggattggggaagtgagcatacaaaaggccgaaagccagcatggtaatttcatcatgaagtatcctgccggacatacagcgggttatgtattcactcatccacaagaaaagacgctctatcacgccggagataccatctggtatgctggtgtcaaacgaaatttgaagcgttttcgccccgaggttatcacccttaatgcaggtggcaatggttttcgcttgggtggacgcgttattatgaacgatgaagatgtggtaaaagttgctgcagctgcacctgatgcaaagctgtttgtgacgcatcttgaaggcgtgaaccataatagcgtgacgcgtgaaatggtgagaaagcgtgcggaagtggcaggaattttagaccgtgtctttattccagaagacggtgaaacggtagaggatttataaagaataaaggaagaaatatggcagaaactctcattgagacgaaagaggtgcatggcatcatgaccaagtccaacctccctgttggtggctattcggtaaatccatacgtggggtgcacccatgcttgcaagtattgttacgcctcattcatgaagcgcttcacaggacataaagaagaatggggtactttcttagacgtgaagcattggcctgcaatcaggaatccgaagaaatatgccggacaacgcgtggttattggatcagtgaccgatggatataatcccgaagaagcaacgttccgcaggacccgtaaactacttgaagagctcaaagacagcgatgcagaaatactcatttgtacaaagagcgacctcgtgttgcgcgaccttgacttgctccagcaaatgaagaaagtcaccgtatcgtggtcagtcaacacgcttgatgagacatttcgtgccgacatggacaaggccgtgagcatagagcggcgcctcgtagctatgcgaaaggtctacgaggcgggcatccgaaccatttgttttgtgtcacccatcttccccggtatcactgatttcaaggctatttttcatgaagtgaaagacatttgcgacctcttttggcttgagaacctcaatctacggggtagttttaaggccagcattatggggtatatcaaatcacactatccccatttgttcccactttatgaacaaatctatttgcataaagaccgaacatactggaagcaattggagcaagaggccgcgaaaatggcgcaggaggctcaatgtaagtatgtggataatgaattgccttacgagcgaagtcccaaaggacatccctcgatagtgaattatctttatcacgaagaaatcagagggtcgggaaatacgggtataaggaatgttatacaataaaataggtacgtatctctactgttgacagactacttggagaataactacttatagggctttccgtatactagaaggcctcaagaacatagttgtgcgtagttagacggtagtaataaccattcctattttctgactacaataccatcccttttctctttcactgtattctctttctttgtagttatgtagtaagatgatatcggtgaaagagaaaagcatatccattgataccaccacttccatataggagcatctgctccatcacagaagcaggacgttgtaacttttggcagaggtatttcctgaagaactatgcttccgtgctgtccaattgataagacaaaacgatgatgatcgaaagcggataaagcggagcataacctcgtagccgtccgttcacatagacttccagatctctagtgtctctttcttcaggatatagggaagatgttttgaggagtagttgcaatcaataattgagtttcctctatgtttacaccgaagaaatctaccaattggctctctgtcatggatatatcacctttccctttgtgagagatttgcgtattgtcatcctgcttgaaataaatgcggtctccttttgtttgatggtgatcgacattcatacgacttcctcctttgcttcttcgttttgatatttccatatcagcttgtccatatcctaccaaatcttattgattatcacctgtacatagatctggggggcttgatatggaggtgtgtcccattattttgacaatgctttctatggatattcctgcacttaaactcatcgtaccgaatgtgtgccttgccatatgtctatgtggctggtatctacttagaggaagaggtcggcgatgatgccgtcggagacgaagataccttcgggagtgaggcgaagggtatcatcgctgtgggtgagttgacctcggcggaggtattcgcttgcagcttgtagaagttcccgcttggcgcgctcaccgaagcgcgccgcatagtctccgagcgggatgccccactgcgtgcgaaggcgcgtgaggatgtactcgtgctggagctcttcgtcgccgaggaactcggtctcgtagtcgcgcctttcctcgaggagtgcacgggtgtagtgagtgagagaggcgatattgtgcgagcgggtacgtgccccgtcgaagctatgtgccgacggccccaagcccagataggggacgccctgccaatagcccgtgttgtgccgtgcgtagcggtcggggagggcgaagttcgatatctcgtagtgctcgtagcccgcagccttgagctcggagatgaggagctcgaagaagcgtaggctcgcctcctccgtcacgggctgtaccttgccccgctcgacaaggcgtgtgagcgcggtgccttcctcatagatgaggtggtaggcggagagatgggggacgccgagtgagaggaaggtgcggatgttcgtgagccatcgctcctccgtctgaccaggcaagccgtagatgagatccaggctgagattgtcgatgccatgacggcgtagagcttcgacagcggtgaagacctgctcagcgctatgacggcggttgaggaacgttaggtcgtcggcgtggaagctctgcacgcccatactgacgcggttgatagggagcgcgccgagagcctgggcgtactcctccgtgacgtcatcgggattgcattcgatggttacctcacccgtgcccgtcagcgggtagagctcggtgatggagtcgaagatgcgggtcagctcctcaggagtgaggagcgaaggagtgccgccgccgaagtagatgtggtctatcaatgcgccatcagggagctccacccgccgaaggtgaagctccctgatgagggcgtcgaggaagtctcgacggagacggctccccgtctgggtgtagaagtcgcagtacgagcagcgacttgcacagaagggaatatggaggtagaggttcatgctacttcccaccagccagagccttgaggtcgggaaggctgatagtgagtgccgatgtgcagggggtcgctacgccgaaggtattgaccgcttcgacgccgaactcgatggagctactgccgttgaagtccgatgctacgagcttgcactgtggggaggtgaggcgaggagcgaggagcgtcgcatgctttgctccgctctcatcggtcgtgatgacccagaggcgccacgtcagcggaaggtgcttcggtgcatcgggttgctgccatgagaggatgacttcgccacgcccagcaggcttgagggccagctcggtaggtgcagcggcttggaatgccttcccacgagcgaaggcaagggggagagctgtcggacggaaggcttcggcgatgatacggcgcgtcgctgggaagcgtgctcctgtatgtgcttcgcggaagaagcatacgccagagagaccgacttcgcgctcctctgcgatctgctcctcgatgaccgtctcaggccagcccgtctcctccacgcggtagggagcgagccctgccacgacggggatatagcgtgcgacctgctccttccattcgcggaggaaggggctatagaggtcatcgcggtagtacatcatcgggacgatgaagtcgacgagcccttcacgaccccacgtctcgggatcttgatgcacggactcgtaggccgtccagccatgggcacgaccgaggtcagcgatcttacgtagcttgcccagtggcgctacacttaccagtgcatgcgatccgatgctctggagcgagtctcgtacttcgcggagctgcagggtgagattgttgcgtcgccaagctgacttgctttcgtactctgagccatagcgcatataggtactgccatctgcgaactgctccgctccctcaggatagcggaagtagtcgaagtgcacgccatcgacgggatagcgtcgcacaaggtcagctgtcagatgcgcgatgtatgagcgtacctcggggcgccctggatcgaggtgataggagcccttgtgagggatagcccagcctgggtgatccgtgaggatggggtggggagctcgcttggaggacgagagtggataggtgacgagccaagcatggaggctcaagccacgtgcgtggcaagcctcgatagcgaagcgcacgggatcgtagtctccgaagaagccttcgccagcgaagcgcgtggagaggggctcgtagtcggagggatagatgaccgtaccgctgtggcggagctggaggaagaccgtgttgtagccatcggcttgcagacggtcaaggatacgcaggagcgactccttctggcggcgcacgccgtcgggtgtatccgccttatcacggggccagtcgagaccgtagacggtagtgagccatacggcacgcatctcctcacggatggagtcgcctgtggggcgagtccagtgcgaggtagtgtcttctacgggagctggcgtgggaacgggtatttgctctacgggctgctctacagccttgggcttgcgggtaccgcaaccagcaaggctaagggtaagcacagtaccgccgaggagcaggagtttctttgctgaggtcatcccttagtggtaagcgatattgtcgatcaggcgcacctctccgcagtagacggtgatgcagccatgaggggcagggctatcgctccaggatgcgatgggctgtaggctgtcggtatcgacgatctcgaagtactcgacacgtagggtagggatggcattgatctcgtgggtcacacgctcgatgagctcggcaggcgtcaactcgcgtacccagctacggctctcggagaggatgcggtagatggcgggagcggctgcgcgaccctcaggagtgaggcgcacattgcgactgctgagtgccagaccatcggcttcgcgcacgatggggcaagcgatgatctctacggggctaccgatgagacggaccatagcgcggatgacggagatctgctggaagtccttctccccgaagtaagcacagtcggggcggacgatgtcgaagaggcgggagacgacctgcatgacgccattgaagtggccaggacggaagcggccttccatgacttcggctacggcgccgacgtcgaaggtacgcttatcctcctcgggatagatggtgctgacctcaggagcgaagagcgcgctggtgccgaccgaggagaggagttcgcagtcggcttcgagtgtgcgggggtaggtctcgaggtctcgaggatcgttgaactgtgtgggattcacgaagacgctgacgatgcagcgatcacattcgctgagagctcgcttgacgaggctcaggtgtccagcgtgaagtgcccccatggtggggacgaaggcgatgcgatgcccttgtgcacgctccgccgctacgaagacctggaggtcttcgatgctcttatataagttcattgttatgagtagtaaggtctcggtttacttcttgccgatgctgccctgtgcagcgaggtattcggcgatctgtacggcattcagagctgcgcccttcttgatctggtcgccgacgcaccagaaggtgaggccattgggcgtcgccaggtccttacgcagacgacctacgtagacggggtccttctctgcgatgaagagtggcatgggatatacttgatccgaagggtcgtcctgcaggactacgccaggcgccttgcggaaggcttcacggacatcgtccagtgagagaggcttctccgtctctacccaaatcgcctcggagtgggcacgggtcacggggacacggacgcaggtagcgctgacctgcacatcgctgtgcatgatcttgcgtgtctcgtggtacatcttcagttcctccttcgtgtagtcatcgtcgccgaagacgtcgatctgagggatgaggttgtaggcgagttggtaggcgaacttcttcacctcgggctcttcgcctcgggcgatggccttgatctggtcatccaactcggccataccacgggctccagctccgctggctgcctgataggtggctacgtggacacggcggatgtggctgagacgctcgatggcgttcagggcgacgaccatctggatggtcgtgcagttggggttggcgatgatgccacggggacgcacgagggcatcggtagcattgacctcaggtacgacgagagggacatcatcctgcatgcggaaggcactggagttgtcgatcatcacggcgccgtgcttggtgatcgtctctgcgtactcgagggatacactcccaccggccgagacgaaggctacgtcaatatccttgaagtcatcgccgtgctggagcaggcgtatcgtatattccttcccacggaaggtgatcttcttccccgcgctacgctcggaggcgaacagttctaatcggtcaattttgagggagcgctcgctgaggacacggaggaactcctgtccgacggctccactgacaccgactatagctacattcattggctgaagttcggtttgtctcttagtaaatacaatggccagcagctatcctgagcactctgctcgggtagctcctgtccgcttatcgcttgcaaagatacgaagaagcaaccgaccctaagaccccgcaccgaaggtgacaccgacgactcccgcaaggagtgctctcatagaagggaaattcggtggggataaaaaggctatcaaggtatccacctgaggaggtgctgtgatgctatataggatggcgaagaaagctatatagctttggactgattcctatatagctttcggtgcgaagctatatagctttgagaagtgacctctattagtttgttgctccgcgtagggataaaagttgtggacgagtgacagataagtttgggctacgtacgtggctctaatatctacgtacgtggatatttggatttacgtacctggtctttaagactacgtacatagacagaggaaacccactacgtgaaggtgctttttccttcacaagaatgacacttttccttccgctgaataagaggaatactcgcaataaggcgaagggaaaagtgtatcacttcggagagctatatcggggtgctgggcgcgtgatgccttagcactctaaatagaggacaggactctgccgcaacagtctcctatataggtcggacgagcaaccaatataggtcagctcggtgaccaatataggatggtgcgcccgctacgtgatggcttcttctgaagggggctgataaggggacttctcttagcttagagaagtgtggggaagaggtgtttggcggaggtatagagctgctcgcgaagggtggattcgtccagagtaagagcttcggatgccgcctgatagacggcttgaatagaaagctcaggggcgtcgtctgtctctaagaaggcttgcccagccgcatgagcttctcgcagactctcggagcagaagtactcgccgaagctaaggtagagtccagcgcgtaggagctgacgtgcttggtcaagtccaccacggaagccatggattatccagggttgcttaggctggagctcacggcgaaggcgaagaagctcgtcttgagcgcgtaccaagtgaaggatgaggggaagctccagctcttcgctaaggaggatctgtgcgcgaaggatcgcgagctgctcggcgagagtggtgtgcttcgtggctttgtctaagcccgcttcacctaaggcgatgacgtggggaagctggagggctttgcggagtaaggggagagattcctctcgtagctcctccgctcgccatgggtggagacctacgctgtagtagagggtgtcgtgggaggggcgtgtgtccacctcagagaggtagcaactcaatagctctacggtgtcgggcgtggagcgtacgtggtgagtgtgcaggtcgatatagggggcgagctgctcggtcatggtggagatagatgtcgctaaggtacggggtcgtagccactaccaccccaggggtgacagcgcaggatacgacgcacagcgaggtagagccccttgaatggcccgtgcttgcgaagtgcctcgatggcataggttgagcaagagggtgtgaagcggcacgaggggggcgtcaggggcgagatcgctcccttgtagaagtagatggggagaagaagaagcttcgtcagtagggctttgacgaagtcgagtacacgcttcatgcttcttcgttagttggctctttcgccttgggcatcagctcctcacagatacgggagagcgccttgtccataccgcgattgacgtcggcctgtgtggggagctccttcgccacagagaggagaccgaggtggatgtgcaggccctgagccttggccagatcaaggaggcgatgcttacgtaggcggtagctctcgcggatgaggcgcttgacgcggttgcgcttattggctcgacggaagtacttcttcgccgctacggcgaggatggcacagctgggctcttcgccctccccaataggagtcgcgttcactacgacccgaagtgggtaggcgatgaaggcgtgacccgaagcaaaaagggcgtctacatctcgcttgagatgcagacgctcttctttgctaagcgtatagcgtaggggagtggtagtgagatcttccacgatcagcgaatgcttcgctctctggagagcagcctacttgttcttctccttgaggtactgctcgagggccatagccatcgagggggcaccatcggtaggagcggagagatccaggcgcagaccagcctgctcgatagcctggcacgtggcgggaccaaagcccccgatgaggaccttgccctgcttgtagtcgctgtggttcgcaagcagtgatgccacacctgcggggctgaagaagatgatcatatcatacttctccttcttctcggcagcggtgaacttcttgctgacggtgcggtacatgatcgccttagcgaactggagcttcttggatgtcaagaggtcgatgagatcgttcttatgatcctcagccatggggaggaagtagagctccttgctgtgcttctgcataatcgctaccagctcagcctgcccccctgcttcgggatagaagaccttgcgcttgcggtagacgatgaacttctggaggtagttggctacctgctcgttgatgcagaagtatttcatatcctcggggatggtgacacggagctcttcgctgagctggaagaagtgctccatagccttgcgcgaggtgaagactatcgccgtatgatcaaggatgttcaccttctgattgcggaactcacgtggagtcaccgactcgacttcgatgaatgcacggaacgtagcttcggctccgtagcgcgcagcgatatcatagtaaggggacttccccgactcgggtcgaggctgagagattaggatcgtcttaatactcattgaaacgtagtgggaaggaggagatcacccctcgaaaaggagatgcagagccctataacgtaaaggaagggagcaatttcgtgggcgcaaaggtacaaaaaaaggaagagggagcctgtagaactctgtgtcagacggcgtatgacttgtactataccgaggagctgaaccaggagtaagacccctgccgcaatggcccaaagagtgatcgtggagaggggagcaaaggtcaagagtgagaccagtgccatcagtagagctcgcagccaatcttggaagaaatagtcttgtgccaagaggcctccagagagattgtcaagcaggatatagcgccagagcttgaaggagagcgagcggatatataggaagaggtacatccccacaaagagtgctgtcagcgtggtgaggagacctatatagtccccctgcaggatcagcccttcgcagctcagaagcctcaggaccgtcagccccgtcgagaggctgcctaagacatagacgaggaagcggaagagtccgtaggagacgaagcgcgagatatataccgcccccgagtcggggttggcttgccgacctgcctccagcgccacaccgatgaggcctggggtgtagacccagacaagaagggtgagtagccagatgacaagctcggtgatatagctgacgttcgccaggggctcgaggcgcacaaagtccatgcctatcgtagggggtaaccgtggcctacccatcgctcccacacgctaccgaaggagcatgtggagacgatggggagatctatcggtatctaatttatagtaggagtgttgccttagaagagcttctcgggataggcgcccgtagaggccagagctgcgagcttggcgacgacatcagggcggtcttcggcgtaggtgacaccgaaccaagagtcaggcgtgtcgaggacttctaccgtagaggtgccttctgcgacgaggtggttgactacgagagggatgtagtactcgaacttaggattagccttctgctcgttgaggaagtggcagaagagcttctccgagtgctggaagtagtcaggcgtgaagccccacatattcatcgatacaggcgtattctcttcgaggagctgctcctggccgttctcgtccgtgaaggcgatcttaccatcagggcgacgagcgatagaggtacgctcgacgacacccgtgaggaagcccttgtcatctacctcgcagacaccgcgtgctactgtaccgctttcgctgagcgtattgcctacgcggtagccgaccatgcagtacttgtcgtggctgtcggagaagctgcggagcttatcagccagagctgcgaagccgtggcggccatagaagtcgtcagcgttgatcacggcgaagggctcgttgatcacctctgctgccatcatgacggcgtggttcgtaccccaaggcttctcgcgaccctcggggacagtgaagccttcggggagcttgtccagatcctggaagacgacctccacggggatcttgtgctcgtacttagagatgatcttctcacggaactcttgctcgaaggtgcggcggatgacgaagacgaccttgccgaagccagcgcggatggcatcgaagatcgagtagtccatgatggtctcccctgagggaccgactccgtcgagctgcttgaggccaccgtagcggctacccatacctgcagcgaggacgactagtgttggctgtttcattgctttgattgttatgaagctattgcttgttgtattgtatctcttgttagcgtctgccacggcggctcttcttagagctgtggctcttgtggtggctatggcccttggtactcttggaggcatttgtcgcagacgtcgtcttagttaccttggtgatgtggagcgtctgcccagggcggagcttatcggaggtaatgttattgctcttcttgagctcctctacactaatgccattcttctgggcgatggagtagagcgtctcacctgtggtgacgacgtgagctgtggtcgtcgtctgctgcttggcttctgccttctgacctcgggtgcgacgggtgggctgctcttcttcggtgacaggcccttcctcttcgctggaggactggcttctcgtcgcagagcgagtcgatgcagtgttgcttggcccttcgaggttcacacgcagctcgggcgaattcacttcactccctgcgctgtcaagcttgaggatggcggagagggggaggcgtacggggtagggtgtgtcattccctgggatgatgccacggcggaactgtgggttgaacgtcgagatcagctccgtcgatacccccgtgatctcggagatgcgatcgaaggtaacgcgatgattcgccgtgtaatagtccgtagccagcgggcgacccagctgacgagggtagatgccgtactcgcggtggtagtgcatcgcgaagtaagctccgatgaagagggggatatagcggcgcgtctcgttcggcaggtagcggtagatgtcccagaagttggggtgatcagtgttcacacgacgaagggcacggttcacattgccagggccacagttgtatgcagcgaggacgagccaccagtcgccgtagatgcggtagagatccttgaggaagcggcaggccgcctcggtgctcttgacggggtccatgcgctcgtcgacaaggctattgaccgtgaggccgtagatcttacccgtcgggagcatgagctgccagaggccagcggcgccagcaggtgagatggctttaggattgagtgccgactcgacgatgacgaggtagcggagctccatagggaggccattcttgtcgagagccatctcgatctcggggaagtagagatctccgagggagagcatggagctcaggagaccacggcgcttgaagaggtacagctcgatcgcctcacgtacgaggggattgtagctgaatcgcatcgcggagggcatcttgttgagcatgcgtacatagacgctgtcaggcgtgtaggggacggacacggagccgtagcgggagcctgtgctcttacccgtcgcattgccatagccggtgtaccactgctccagcatcttctccacgtccttatcaagcgaggtggggagggtgatgggatcaagaagggcagaggccagggtgaagggcgaagcgatgcggtcagcgcgtcgcgtgctatcaacctgtgcggagaggctggatgccgagaggaagaggaggaaggctaccgagaggagcttgatgtgaagcttcatcggggaggggtttagaaggtgaggctacagttcactcccatctgataggagggaagaccgagcttaggaagtcccacttcggggacgacccgtagagagaggtcggggcttatgtcgaaggtgtagagttcggcatcgacataggcatcgaggatggagaggccgtagacgaggaccgtagcgacgatgctgaggtctcgatagcggcggtagaagtcattgcctcgcttgagtgtggagcgcagtgaagactggtactgctggtagtcggatgcctgcgctcccgctggggcaaagacgagccaagaggtgttgtgctcgggatcgggccccgagaggtcgcggtaggctgcgtggtactcctgatactggcggttattccacgtgatggagtagtagcaggccatgaaggcgccccacacgatggggagcttccagtacttgcggttgtagatctgcccgccaccagggaggaaggcccagaggatggctttggtggagttgggctgccaaagcgcctgctgctggatcttcagagcttgcttctcgaagctgggaagcggctcctgcgtgctgggggcgacgctgtcgctcgcagagaggagcgaaggcatatcataggtcgtcggcacgggggactcctggctccaggccgtggcatggggcaggatcagtagggagaagagggcgatcaggagtcggatgcacatagggcgatgagacttgctgtagagctactgctggatacgctcgaggagctgcatgatgcgctcgaggtcttcgtcaccagagaaggggatggtgagcttacccttacccgaagcggagcagcggagggtaacctttgacgagaagacttgagccaagtggcgctcaaggagcttgaagtccttgcgctcagccttcgcaggctgctgtgactgtggtgtggggaggggcgtagcctctggctcctcagcgatagcgcgggcaagctcttctacagcacggacgctgaggtgctcggtgatgatgaggttgtagagctcgatctggcgctccgtatcctctacctgcaggagggctcgggcatggcccatatcgatgaggcgctgcgtcagcccaagctggatctcagcggggagctggagcaggcggatgtagttgctgatggtgacgcgcttcttcccgatgcgctcagcgagcttcgcctgcgtcagaccatgctgctcgatgagctgctggtaggccaaggctatttcgatggcgttgaggtcttcgcgctggatgttctcgatgagagcaagctccagcagttcgccttcctgtgtcgagcggatgtatgtggggagtgtcttcaggccagccagctgagcagcgcgccagcggcgctcacccgagatgatctggtaagagccagaggggagggcttgtacggtgataggctgtacaagaccgagagcacgcagggaggctgcgagctcctcgaggccttcttgctcgaagtgcttacggggctgatcggggttgggagcgatcttctccagcggaagctcttggattgagacggtggcttggagggctgctgatgcagtctctcctccgaggaggttccccaggccacggcccaggacattcttattctttgctgcggacatctacttattcttgttgatcagctcggctgccagctgtaggtggttgatggctccacggctatcggcatcgtagagtagggcggggaggccgtggctcggagcttcgccgagcttcacattgcgctggatgacggtctcgaagacgaggcccttgaagtgggacttgacctcctcatagatctggttgtttaggcgcgtacggctgtcgtacatcgtcatgaggaagccctcgatatcgagctgtgcattgaggcgctggcgtacaatacggatggtgttgaggagcttagagatcccttcgagtgcgaagtactcgcactgcactgggatgagcacagagtctgctgctacgagagcattgacagtgatcaagccgagcgagggggagcagtcgatgaggatatagtcgtagcggtcgaggacgggtgcgaggacagagcggaggatatactcacgctccgagcgttccagtagctcgagatctgcccccgccagatcaatgtgcgaaggcaagagatcaagaccgtcgacgaccgtcttcgtgatggcctccgtagcaggcaggccagagcagaggcattcgtagatcgtcttgcctatctgagaggcatcgatgccgatccccgaagtggcgttggcctgcgggtccgtatcgaccaggaggacgcgcttctcaagggaggctaaggaagctgccagattgatagcggtcgtggtcttacccactccgcccttctgattggctaatgcgatgactttgcccatgtgctctatatctctatatataacgtatgctgtaggtattcatttacctctcgaactcctttcctatggataagggtagacttacctaattagcccacaaaattactacttcttaacgatatgttttccttgtcgtggctgaaaggtggggctccgagagtaaaagtcagagtagtcccttgaggctgaggaagtcgccccctcactcccaactatcatcttccctccctcagaaagctctcagcagggagagcgtgagaagagcaagctaagtacttgtcttggggccttcgtgatggggacaggtgaacctatagtggtcgctgggtgaacctatatagctccacgtcgagaccaatatagattgtgaagcgaaccaatataggttcacccagcgaccaatataggtttctactaaccccttagaggcctacgatgcggaagaggagcgagcgctctaggcgagtgccatcggggcgggtcaatttgatgtgcaggagtagaggcccttcggcggagactccgatgattcgaagggcgtcggcaggcatcgtgcggaggctttggatccaagagtcacgtgcgagagaggtgcctcgagcgagaagctcacctgtcagtcgataaagagtaaagtgacattccccatcgggagagctatccagtagggtaaagagctcttcgtctgatagacgcttttgcggagtgtcatcttggttgccaccgccctcctctgcggaagaattcttttgccctggagtcgcaaagccagccgaacgggctgcagcatgccagttgcctgcctcttcgatgactttatagtcctttcgctcaagggcaatgcccgccttgcttttcatacccttggggagaaggctgctgtcgtagtgaaggaggtcgactaccagcccgtcatcgccgaggagcaggccaattagtccactctgattaagaaggcgggggaagctagcctttacaaagacctcgcgaggagcattagggtaagctttcgctaaggcatcgggatctttggttattacgatgtagctgccagcagggatagagcgtagtgggaggggagtgatcttgtaggatgagccgtcgcgccctgctgccagtgcatagtcgcccagctcacagggagcatcgctagcattatatagctcgatgtattcggggcagtccgtcttgggatgcggcatgatttcggagagaagcaagccgctcttaggctgtggaataggcgtcgggacgggatctggtcgaggtgacgtgccttcgtcgcctatagggtcagtctcgctcgtaggatagatacggagctgtcggaagtgccaacccgtatggtgcgtgctggtgaaggtacagctgatgccaaaggtgttcttctctggaagggtggggcggaagtcttcctcctcgccgatgagctcccattcttgctcgctgccggcttctctcaggtagagttgccagccaccttcggcgctatagcggacgtcatagtcccaacttcctgaagcattaagtgtggtggagctggagatgagtgggcgacccagagggctgagggtcaggtaagcgggattgccaccacttcgctcgacctttacccgtcgtagactgatgtgttgttggccaccttgcccgaagtctaatgccacatattcgtagctctgagtatccaatgccttaatggcacagaggaggatcgtcgcatggttgtaagctgtggggatgaggtccatcttgacctgtccccgccatacgggggcagtggggagggtgacgttcgtgacgatagaggctgaccctcgtacaggctccttgggtacagcgaggtgtagggctcccccagagatgtggtagagcccacggtcatagcgccagtgcttctccgtaggcgtgccctcggtggagaagtctgcttgccatacttgggcagaagcgcagatagggaagaaggtgaggagaaggagataaagaaaagggtaacggtagctatacatcggcagctgtgtgtgctccgagcaagcagggcaatggtggtcaatcgccgtcagagcggtcatcacggggggtacgtgctgcccgtggatgtgccgcgtagagcttcttcagttgctcgaaggaggtatgtgtgtatcgtacggtagtggagacggagctgtggcccatgagctcgcgtaggagcatgagatccgctccggagttaagcatgtcggtagcgaaggtgtgacgcaggacgtgcgcacctcggcgggagagattggggacggaggcgagtgccgcatgtgcgacttgatatacggcacgggggagcatgggcgtccccttgctgctgacgaagaaggattccgtcgtgccgaagatagaggtgcgcaggtgacgccacgcttcgatctcttcggcaagacctttgccgaaggggacaatgcgctctttgcgtcccttacctaagaccttgagctgacgctcggtggtgtcgacagcttggtcacgtagaccagcgatctccgagcgacgtagaccacactcgtagagcatggagaggatgaggtggtcgcgtaccgcccgccagtccgtcggatcaacatcctccgagagcatctgctccatatcttcggtaggtacatagacggggagcggacgtgcagctttcggcgggcgaagagcttggatggggttgcgcttgatctgccccgtcttcagtaggtgtcggtagaagcttctgaccgaggtgaggcatcgccccaccgtcgaggccttcagcccctcgtcaagcttgacggatagccagccacgcaccaagtcgagatcgccctcagaggccacgaatggctctcctagacgctcctcagcataggccgtgaagctcctaagatcagactggtaggtctcgatggtcaggggcgaggcggctgcttcgtggctgaggtagtcgaggaaggcgcggatcgaatcggtggtaggaggcatcatagagagtcggctaaggcgctaagcgctcaaggctccatgtgctgtcctcctgtagctcgtagaggaagcggtcatgcaggcgactatcacgcccttgccagagctcgatacgtgagggggtcacggcgaagcctccccagttctctgggcggggcacttcgcgcccgacgaagcggaggctctccgcagcaaagcgcatcataatgtactcgcgtgaggggatgggctggctctgcggggagatgcgtgctccgacacggctcttgtaggggcgcatagcgaagtaggcatcactctctgcggcaggtagacgctcgatagtcccctcgacgtggatctgtcgctcaagctcgtgccagaggaaggtaagggcgacgtggggattggccgctatttgcttgcccttgcggctgtcgtagttcgagtagaagacgaagcgtccctcgaggatctccttcagcagtacggtgcgcatgctgggacgtccttcgggggtcgatgtccctacgatgacggcagtgggttcgttgaccttggcctctatcgcctgatcgatccatgtgctgacgatctcaaggggatcggcagggagatccttacggctaaggctgagcgaggtgtactcgcggcggatattctctaagtgtaggtccttagacatagttgtggtgaatgactgtaggctttaggccttgcccttagcttccttgagctgacggatctcagcttcgagggcggcgatacgctcgtcctgtgcgtggatcgtctgctggtaggagtttagctcttcggtctcgatgctgctcggtgcctgctcctcgacgcggagaaggaggtcgctgagtacgttcatatagttgttgaacgcatcgtaaggcgagttataagggctgaagggatggcctccccagttgatggtattcatatagtagaagtggtcggcgctctgcagatagagccagtcctgtaggaggctacgatcttcgagagcatggacacgctcaccccattgacggagcttctcgagggcgccgtgctggaggatgttgccattccactcgttggtactcttctcttcgcctgcccagctgatgggagaggctacggtaagcggtgcgatggacttatgctcgtcaagaagctccgatggggtcgcgaagcctacagcatagtcgggagccaagagaggtagtgccttgaagaactcaaagatacccgactcacggcggtgcatcgctccgagtacctcgtagttcatatagaggagcgtgaagtcctctccttcgggaagccacttgactcgtccgaggagcttgtcggcagtgacgggatactcgggagagccgtagttagtgaagtggtttgtcaccagctccgaaagaggagcattgcgtagcaggagcttggtactaggctcggtgactgcatcgtagagatagttcgggctcttccagccgaggatgtgcttagctccctcggtgataatcccttcgtagcccattgctgccacctcactggcgatctcatcggagtagatgagctctgaattgcagaagacacgagagcgctcggtaccgaagagctcgcgtagcttcgtctgctgcatgcgtacctgattcctgaactctacggggtcatagagtgaggcgacggagtgcgcataggtctcagcgacgaactccacgcgtcccgtggcagcgagctccttgaagctatcgatcagtgcaggcttgtagtactccatctgctcaagagccagacccgagatcgagaagcttacacggaagtcggggtaggccttcagtagctcgaggagcatgtggttagcagggatgtagcacgagtcagctatgcgctcgaagacctcttcgttgaggtagtcatcggtatagtagtgggagttgccgatgtcgaagaagcgatagcgacgcagtctatagggctgatgtatctggaagcagaggcatatctttttcataacggatagcgggtatgtcggtgtagtgattagtggacgtagcgatcatagatggcgcggaccttacgtccagctgcctcccaagtaatgctgttgacttcccgaagcccctcttccttgagaaagcggtgcatctcgggataggtgataagtgcgtagatggcatcagccatagcgtcgatatcccagtagtcgaccttgacggcgtagttgaggatctcggcgcatcccgactggtaggagatgatcgaggggactccacactgcatcgcctccaagggcgatataccgaagggctctgagacggagggcatgacgtagacgtcgctggccttgaagacctcatagacctgctggcccttcataaagcccgtgaagtggaagcggtcggagatgttgcgctctgcggcaaggcggatcatcgcgtccatcatgtcgccgctaccagccatgatgaagcggacgtcttgtgtgcgctccaggaccttcgctgcggcttcgacgaagtactcacagcccttctgcatagtgatacgcccgaggaaggtgacgaccttgtcgcggacaccacggcggtcggggagtgcgaggatcgagggtgccagtggcgtgaccgcattgtgcacggtcgtgaccttggctggatcctggtgatacttctcgatgacggtacggcgggtgagatcgctgacggtgatgatgtggtcagcgtggttcatcccgtccatctcgatgccgaagaccgtagggttcacattgccgcgactgcggtcgaagtctgtggcatggacgtgtacgatgaggggcttgccggtgagctgcttggcatggatccctgctggataagtcagccagtcgtgcgagtggatgatatcgaagggctcactgcgggcgatgacacctgctacgatggagtagttattgatctcctcgaggaggttgtcttggtacttccccgagaactcaaagcagcccaagtcattagtcggtaggtaggagaagtccgcatagatatgatcccgtaggcggtagtagagctcgggatccatcttcccctcgaggcgatcacggacgtagtcatagttgacgtctcggtagacgactggggtatctcctgctccgatgattctgaggaagctcttgtcttcatcgccgtaggggcgggggatgacgaaggtcgtctccatatctccctgggctgccataccctgggtcaagccatagctggctgtaccgagaccaccgaggatgtgtggtgggaactcccacccgaacatgagcgctttcattcgtatctaattatggggaggatctgtgtgtcgtacttactcttagcctcttcgagtagggcaagtgagcgaagcagttccccgacgctcatcgcgaaggagatggcaccacggcccttgaagggaggattgccgtcgaagagttcgctcacggtgcctacgccatgctgctggagctcttcctccataccgatgagcgtgttttcgatgaaggagatagcactgcgcccgtagagcttgatgcaggcctcgaagtaggggccgaggagccaaggccatacggagccgttgtagtaggactgctcacgctgccactgtgtgccgtggcactgaggctggtagccgtcgctctttgggctcagggtgcggagtcccttcggcgtgcgtagctcacgagtgatgatctcgaggacggagcgacgggtagccttaggtaggggcgagtaggggagtgaggtggcgaagaccatgttcggacgcacgctccagtcacgccatgaggtgtgaggatgtacgtggtcaaagaggtagccatgctgattgataaaggtgtcgcagaagctctgctgtacgcgccctagcagctcctcgagctcaggtgtccatttctggggaagggcttcgcggtagaagcacagggcattataccacagggcattgacctcgacgaggtagccttcacggcggacgaccgcttgaccattgaccttcgcatccatccatgagagaggacgcccgtctcccgtcatcacgcacagcccgttatcatcgatgcggaggttggggtgtacgttgcgtagataatagtgtatcagctcatcgaggaagtctccatagcggctgaccatgtcggggaggctggaccagcgagcatactcttgtagcgtccagatggcccagagcccgatgtccccctcgttgatgttgcgtatctccttggagataccctcctggcgcatgaaagctcgcatatctgggagcactgtgtccatgatgcggtagaagcgctcaggagcatcggcatagatggtacagcctgggagggcgatgaagaggtcgcgagctcgcaccccaaaccaaggatagcctgccagcaggtagccgtgtgtagcgtcggggcggtagtagaattgcagagcggcattcagcagacagctacggaagtcctcacgaggggtgcggatctttcgttcctcagcgaagagctgtgctaaggtatcgggatcggcttcctcgacgccagctgagaagtagatcgactccccgacctcaatgtcgacctcgaagtagccggggacgtagaggtcctcagtgtattcgtagccacgctcgcgctccttgatatattcgatacgctcattccagtgtgggtcagagacgaagttatgagcctttgatagctggaggtagagcgtaggatagcctggatagaggcagaaggtgacccccgacttagcctgaccatagtctccgtggtactgatcattgcgatgcgtgagcatcttcacgtcacggaaggcgaggaagggagagagtcttaaggtcgtgcggctgtgagcctcaaggagcgtgtagcgctgcagcatcctattggtgtagtggcagaagagaaactccttctgcagtaccacgcctccgacacgataggtcgtcgaggaggcgatatcgacattgtactctcggatgtacttgtgccccttggggctgaagatatcgccctcatactcgtggataccgacgttgaacggcacaccatgctgcacgatcgtcagatcgaggctggagagcagtacgtggttgttctcactgagttcggggacggggatgacgaggacgccgtggtacttgcgtgtgttacagcctacgatgctggagcagcagtaggcgcccttgcggttggtacgtatgtactcccgctgggtggactcatcgaggttggccatgagtcggcggtcgaacttgaggtaactcatgctaagtgtcgcttcattgtggtcaggctccgcactgtcaagggacccatagagaaagcctattcttgcgaagtcgtgtataattctcctgctaagttacgaattagcgactgctttgccaagtcttcatcctcccgtagatagagcatagtgggaggctactccgagagtactcagatacagggaataagcccactccgatgaggggagatgaacccgtgctggtcagatcgctgaccagtactgcttcgtttttcctccttcgctcctctcaacctaaagactccgcttttcgagagaagaaagtacgagtaatgaagaggtgaccttgcacaatggtcccatacattggtatatgggtacgtgggtggagctatataggatggcgaagaaagctatatagctctgcttggattcctatacagctttcggtgcgaagctatatagctttgtgaagtgacctctattagtttgttgctctgcgtagggataaaagttgtggacgagtggcagataagtttggactacgtacgtggatttaatatctacgtacgcggatatttggatttacgtacctggtctttaagactacgtgcatagactgagaaaaaccactacgtgaaggtgcttttttcttcacgcgaaggacacttttccctccgctgaataagaagaatacttgcgataaggcgaagggcttgcgtaccacttcggagaggcatatcggggagttgggcgtgctatgctttagcactctaaactctaaatagagggtaggactctaaggcaacagcctctgcttagaggcgggaatgtgaggcatgccttaggtgcgaatcgaacaagtctgcgcttttgtgtattttagcactatattattgtgtcgtattgcgaccctctgccaacagacaatgaccgagcttaagcccactttcatggagcgcctgcagcgcttcctcacctcgatagcgacatgtaataagcgctacccagccctccgatatatcttggctggggtggctgtcttcatcttcaccttccttctggggaacaatagtttattccactatgtgaagaatcagcgccgcaaagcgtttatccaagaggagtacaatcgctatctcccgcagtatgaagcagacagcgctcgcctcagcgatatccgtgacaaccgcgagcatattgagcgaatcgcccgtgagcagtactacatgcatctgcctggtgaggaggtcttcgtcctcgctcccgacacgactaccgcagctcagcaataagcactaaggccctatgcaagtaaagtataagtacctctatatcgtcagtgtcctgctcatcatctcgggcgctgcactggcactcacggagcaccgcctctttgatgtcctctacggccttggggctatagggtatggcctgtactacgtgttagctcctgagcgagacgcttcgcgcctcttgaggcgtgtggctcgtatgggcgtcttctcgggcctgctcttcctgctctcagcggtagcacgcttcggggtctttgactccttcggccgaggtgcttggcttgtattcctggccttgggtctggtctatatgatctatggcaacgtcctactctatatggacgaaaagaaaaagaactaaaaacatgacctctatatccacccctaagcagcccgttcgtacggagcgcatcgcggtgccaggtgggcgaaagcccctgctgcgccttcatgtcgatgctggccatccgacgacgctcttagccttcctcatcgaggcgctgcccgataagagccgcacgacagtcaagcagctcctgcacgaccgcttcatagccatcggtacggagccgacgacgcagttcgatgcgcctctccagcccggtgataccgtcaacatccatcctgctccccttccgaaggcacttacgcataagcagatcgagatcctctaccaagatgagtacctgctggtcattcacaaggaggctggcctacctacggtagcaagtggcgaggagaaggacaagaccgctctgcgcctgctgtcggagcacctcaagagcttcaatccgctggcgaaggtctaccacatcaaccgactcgataaggattgtgcaggctttgtcgtcttcgctaagagcgctgagctccagcgtgagcttagtgatcactggcagaactacgtccgtcagcagctcttcgccgcagtcctcgagggcgcacctcgggagtctgagggtatcctgatgcctcccgctcccgaagagaagaagggcaaaggcaaggattcgggtgcgaagaagtcacgtgcgacccgctccacccctcgctcggaggaggatcaggctgcaggccgtgctgaatggcatgtcatcagcgaaggcaatggccgcacgctgctctcaatatccctgctcgcagggcgcaacaaccgcctgcgccgtcagctctcagccctgcgcctccccatcgtcggggactggcgtaatggttcgcccgagaaggacctcggtcgagtggcacttgaggggacgcgtctgagcttcgttcaccccgtgacgaagaagctccttgacttccgtcagcccatccctccactcttccgcaagcttctcaagagcacggcacctcgccctcgcgcaacgaagagtcccgcagcaaggtcaaagaagaactaaccgttaatcacataaaatcaatctccacaatgaaccaacagacacggagctttgctcccctacgcccctccctctcggcggtgcgtcgcttcgtcttgagcctatctatcctccttctggggatggggctcaacgctcaggtcatccgcgatgctgtcacttggtcgcgctcagtagaggataagtctcctacggagaaggtcctcgtcttcacagctacggtcaaggatccttggcatctctacggcacggagctccctaagggtggcccaacgcctacgcaccttctcgtcgataaaatcgagggggctgaactcgtcggtggcctgacctccatgcagaagcccatagagaagtatgaccccaacttcgagatgaccctgcgcttcttcagcggtaaggtcaccttccgtcagaagatccgtatcacagaccccaagaagttcgccttcgtcggagctatccgatatatggcctgcaacgatgagcagtgcctccctcccgctaactgggagttcactgtccagcctaaggagctgggcaagctcggtgacgccgcagctacgaagctcaccgaagaaacacctgccaccaccgaagccaccgctaccagcctgggggagccctcagccgatagtgtagcctcggtagatacgctatcggtagcccctcaggacactgccgctctcgcctcctccgacctatgggcccccgtcatccctgagctgaaggcttatggtgataaggctctgaatcaggccgaaggctcactgtggatgctcctcgtcgggggcttcctcggtggtctcgtggcgctggtcactccctgcgtatggcctatgatccccatgacggtgagcttcttcctcaagagaagctctgaccgtaagaaggggatccgtgacgcactcctctatggtatcgggatcatcgtgatctacgtgtcactggggctcatcgtctcggcggtcttcggctcggatgccctgaataatctggctacgaacgctatcttcaacgtcgccttcttcatcctcctcgtcatctttgcgatctcgttcttcggggcgtttgagctcgtcttgcccgcctcttggaccgcgaagatggacgctaaggcagactcggcttcgggattcatcagcatcttctttatggccttcacgctcgcgctggtttccttctcgtgcactgggcctatcatcggtacgctcctcgtacaggctgctacctcttcctcggggatgctcgctcctgctgtcgggatgctcggcttcgcacttgcgctggccctgcccttcacgctcttcgctatcttccccaacctcctgcagtcgatgcctaagagtggtgggtggatgaactccgtgaaggtcgtcctcgctttcatcgagctggctctggcgctgaagttcctctccatcgctgacctggcatacggctggcgtatccttgaccgtgaggtcttcctctcgctctggatcgtgatcgctatcctcctcgggctgtatctcctcgggaagattcgcttccctcacgatgcaccacaggaaaagacgcctatccctgcactcttcctcgcgatcatctctttctccttcgccgtctatatgatgcctgggctcgtcggtgcacctctgcgtgctatcagtgccttcgcaccacccctccgcacgcaggatctgaacctatataatggtgaggtgcatgcgaagttcgatgactacgatgccggtatggcttatgcccgtcaggtagggaagcccgtgatgatcgacttctctggctacggctgcgtgaactgccgtaagatggaggcgtcggtatggatcgaccccaacgtcaagcacatgctcgaggaagactatgtcctcatcacgcttatggtcgacgagaaggcaccgctcaaggagcctatcgagatcatggagaatggggagaaggtcaagctccgcaccgtcggtgataagtggagctacttccagcgtatgaagttcggtgccaacgcacagcccttctacgtcctgttggatcatcagggcaagcccctggctccctcgtacgccttcaacgaagacgtctctgcgtacctgaacttcctcaagtcgggtctcagcgagttcgacaagcgtaagtaacccctccctctcacctcaaacgaatatgctacatagtagagaagagaagctggcggctatgaaccgtctcctcgatgtcatggagcgcctgcgtaaggactgcccttgggatcgtgagcagacgaccgagagcctccgtaccaataccctcgaagaggtctatgagctctccgatgcgatcctctcggggcgccccgaggagatcaagaaagagctgggcgatgtgctcctgcacattgtcttctatagcaccatcggcgaggagcagggtacctttgacctctgcgatgtggccaatgccctttgcgataagctcatctaccgccacccgcatgtctatggcgaggcggtagcagcttctgctggggctgtcgtggagcgctgggaggaactgaagcagcaagagaaaggcgggaataagaccgtcctctcgggtgtccctgcctccctgcccaccctcatcaaggcctaccgtatacaggacaaggcacgcggagtgggcttcgactgggagcagcccgaggatgtctggacgaaggtcgacgaggagcttcgtgagcttcgcgaggcgatcacctctggctctgcggaagactccgaagctgagctgggtgacttcctcttcagcgtcatcaacgtcgcacgcaagtacggcatcaatcctgacaatgcgcttgagcgaacgaatgccaagttcatccgtcgcttccgctatgtcgaggcgaaggcgaaggaggctggccgctccctgcgagatatgaccctcgctgagatggatgccctctgggacgaggccaagcgcctggagtctcagccttagttcgccgcttactccgactctcttgcctctccggcaatatatgttaggcctacctgccctcagcccgcctctccgaagtgcgagtagggtaggtaggcctaatcccttatagatacgtccactacatgacacagatcgtgcgtggatcgagtcgacacccgtgggcgctgatgtggccttcgtcggggaaacgcccgaggcaatgtcttatatttcggggacggatgtgtatgtcttgccaagctggcgtgacgcttcgccccgtgtggtgcgcaaagctatgtcgctctcgctcccgactatcgtgagcgatatccctgggagccgtgatctcattctccctgggcaaacgggtctcttagctcctgcacaagatgcaaaggcgctctacgaagccatccgttggatgctcacgcatctcgaggagcgacgagccatggggcgacaggggcgtgagcgcatcgctcgtgacttcagtcctgccgcttatacggggcttttcgctcgtcttttccgttcgctcgcctcgtcatagactctccgtccgcatggcgtcaaattttcgtgcgcacggaaatttatttctgtgcgcacaaaaaaatattttcatgcgcacgaaaatttcccgccttccgcacagcgctctgatgccctacccatagggtataattttcctcgtctcacagccgaattttcgtgctgaggggcgaggatttttgtaggcaaaaaatcagtcttggagggctttggggggaaggcggagggcttcctcgagaggaaggagcgcgttgatgaggaggatggccttcgccttggagcggagcgtgctgagggtaaggtcgtcggcttcggcgataagccctgttcgcagcagggcttcgcgctgagtacccttgaggagcgggtgagtgggggtgaggtaacctgcttcggtctcgatgagaacgttggtgtagctggtatcggtgatggtgccgtcggggcgcacgaatagcggctcttcgttgtcggcaagctcggccttcatccggtcgaagaaacttcggtcagcgtacttatagctgtactcgaagccttcggggaggaggatggggcgcagtgcacgtattgttcgcttgcagtaggggacgaggcggatggcagagatccctgcgaggctgtactcgagcgtgaggcggtaggtcgcagcggggaggatttgttgccccgtgaggtaagtctcgacttctcgccaagggtaggtgctaaggagactttgtagaaaggtacttccggtatccgccccctgctctcggagggtgcgaagcatgcgttcccgatggagctcaccagcgatgagctctccaccacggagcataaaggtctcgatgaagctcagtgaggcggtgtccgctactgggggatgtagatcttctgcaggcattcgcggtattcgtcttctgtgacgctattgatagtgatgccaccgcccgagcggtagaagtgtgctcccgaagcatcctcctcgacaaagcggatgaggacggcagagtccaggcttgcgccatcgaagtaaccgcagacacctgtgtagaagccacgaggatagccttctgcctcttggatgagcgcgacagttcgctcctttggcgccccgctgatggagcctgcggggaggagctggaggatgaggtcgcctaatcggagccctttgctgcggtcgacgcttccgacgacttcggagctcatctgcagcagcgatccagaggaggtgtggagctcggtgaggtacttgaagcggcggacgtgcacgccctcggatacgcggctcaggtcgttgcgcatcaggtcgacgatggtatggtgctcgcagccctctttgtagtccgctcggagcttctcggctgcatcggggatgcgggcgtcgatggtgcccttcatcgggtgtgtggcgagtttctccccttggagcttcacgaagcattcgggggagaaggacacgaagcgcccagggaggaggacgcggtaggtcgcctcggaggagaggtagatatccgctaagctcgcttcggtctcgatgggcgtgcgaatcgtgagattcgtgaggaagctatctccccgcatcagccctcggtggatgatgtcgaagcgctcagcatagcgctcgggggcttcgggcaaaggggtgagcgtgagcttacccttcgagccgatgggatcgggtgtcttcgccgtggggaaatcgaagaaaagcgagccgtcgtggtgctgcagtggctcgaggacgaagatgccctcctgcagctcgaagtctaagataaagaagaagggctgccctctgtgcgatgcttcgttcatcgcctcgagggtagcccatacttgctcagtgggttggaagggagtgtacattacgtggggagggaagggcgctacttcttgcgaacttctgtcggtgcgagcgtgacgagccccgccttatagagtgagccaaggaccatcttgaaggtcttcttgctcatacccgtgaggcgcatgacgtcctctgcagggctcttgtcgccaatgggtagacgcccgtggtgcttctcgaggatcatgaggaggcgtgcctgctcgccgtcgaccttctgatagcccacggggacgaaggagaggtcaaccttattatcctcttcgcggaggcggatgatgtaggcttcgatgcgctcaccgcgctgaagcatacgtggtgccgtgtcgctgtagagtagtccccagtgcttgtcctcgatgacgcagcggtagccgagctcgtgctgctcggtgacgatgcagctgaccttcgaccctggagcgtagtcggctggcattgtgtcgaggtgcttggagaggcgtgctgagccgacgatctttccgcttagggcatcgatgtagaggtagacgatatagctatatccctcctgcatcttcgttgactgctcgcggaaggggacgaagaggtccttatggatgccccactcgaggaaggctcccgcatcggtcacagaggagcagcggagataggctacttccccgacctgagctaagggcgtgagggtcgtcgctatgaggcgcccttcgttgtcgtgatagacgaagacagagaccatatcgccctccttagctccctcggggaggtagcgtaggggaaggaggatgtcttggatgcctccgtcgaggtaggcgcctatcgatacgaggcgcaggatggggagtgactggatgcgaccgagctgataggtcgagagtggtgcgggctgcatagggcgttattgggggatgaagaccgtttcgtcgcggaggacgggtgcgaggttgagcgtgtaggtctcgccgtgacgttcgatctcgaagatgagctcggtctgctcggtctcatcgatgtaggggcggaagaagaataggtagctgaagacgctggcgtacttatccttctccagtgccttgcggatgctcccgtagtcgctgctcttccatggagcttgctcggggcgcacagcctcagccgaacggtaacggtaggtctcgtcaaggaagttgcggtagcgtgacgagagttctctgacagtcgtggggctgaggggcttgccgttgatgcgaagtaccttatcaccgacacgtagacctgcagtgaaggcaggcgacccttcctctacatcgacgatgcggctgaggtcacggctgtcatagaggatacccgtatagaggtagcggctcgtctcctcagtatagtttgcctgagatgctgcgaggtaggggaagctttggagcattacagggatggcctgacgagcatagaggtgtgcttccttcgtgcccttaggtaggctgcttgtgccgctccagagcgtctgattgggcttgctgggtgaagtgacctgtagggtgaggagtgctcctcccccagcttcactacgcgagcactcaaggatgagatcggggctgttggcttgctgcgtcagcccgcgtgcctctaagagtcccgcgatctgtccgtagacgatatcatagaggtcgcgatgctctccttcagaaggagcgaaggcaaaggtcttggcctgtgaccagtcgaagggtgcgctggactcgaaagagaatgagagggtgtgctgctgcttcgcttggtccatagggctgtagccgctgaaggctgtagccagttcacgctcggtgagggcatagggtgccttgcagctgggacgaagaatgcgagccgtagtgccagagccaatgcgcacgatcgtcaggagatgctcttctacggggcgagcaaggagctcgctgatctgctgcttcgtgaggcctgtggtgggtaccccgtcgatttgggtaatgaggtctccagggaagaagcctccgacagctgcagggccaaagggctggactgctgtaagcacggggatactcttgctcttagttccctcgccgagcaccttatagtgcaggccgatacggcatacattctcgctggactgcgccagtagaggagatgatgagagcgaaggaagcagaagtagggtgagtgctgtccccagcgaacgaaggcagtggtagggcttacgcatcatgagagcggtctatatgtggcgagatatatcgttagggatgagcttcgaggagctgtagagtgaggtgcagggcctcttggatcgcttgggagatgttctcctcacggctccctgataggtgtagggtggtcgaattgacgacgggtcctcttggcccttcgaagacgacggcgatgcagatcgtacctacaggatgtgcagcatcaccacccgtagggccagcgacccccgtcgtggcgatagctacctcggcttggagttgctccatagctccaagagccatagcgcaggcgacctcttcactgacgacgtgataggtctcaatgagctcgggtggcacgccgaggagggaggtcttgaggtcggactgataggtgatgatacccccttggagataagccgatgagcccgagtgactacccaaggtggaggcaacgcctccgagggtgcagctctcagccgtggcgatatggagccctcgctgtaggaggagctcagtgagtgaagtgagatgactctgatccatagatgttgtctcgggctacatggtgacgcgggcgaagggtacggcgtcgagctcggtacgcttgccgtcgatgaagctgaagtagccgttcatcgcgaccatcgcagcattgtcggtggtgtaggcgaacttcgggatgaagaccttccagccatagcgacgagcgtgatcgtggaaggcatcacgcagacccgtattggccgacacgccaccagcgacagcgacctgacggatgcctaagtccttggctgcttggcggagcttcttcatcaggatgtcgatgacggtagcttggagggaggcacagaggtcggccttacgctcctcgatgaagttgggattcttctccagttcatcacggagggtatagagaaaggaggtcttgagcccgctgaagctatagtcgtagcctgggacgttgggcttgctaaaggcaaaagccttcggattgccctcattggcaaggcggttgacgacagggccaccagggtaacccagccccatgactttcgcacacttgtcgaaggcttcgcccgctgcatcgtcgatggtctgcccgatgatctccatatcggaggccgagcgcacgaggatgatctgagagttgccgcctgagacgaggaggcagaggaaggggaactcagggctctgatgctcctcgccctcctcctcgatgaagtgcgccagcacgtgcgcatggagatggttgacctctaccatggggataccgagcgagagggagagccccttggcaaagttcgtcccgacaagcagagagcctaagagcccagggcctcgtgtgaaggcgatggcgtcgaggtcttgtgctgtgatgccagcgcggcggatggcttcgctgacgacggggacgatgttctgttcgtgggcacgtgaggccagctcaggtacgacaccgccgtatgcggtgtggacggcttgtgaggcgatgacattgctcaggagcttctgccctacgaggacggctgctgaggtgtcgtcgcacgaactctcgatccctaatatgatgggttcatgatccatgatgatctatcggatagtctgtctatttataccttattaatgcggcacaaaagtacgaaaactatagtcccagtcggtagagcttcgctgagtggagctgggtagcgccaccattgctatagaggcgaagggtcgagtagggcttgcgggggaagatgaggttcgtcatcgcgatgcgtccgccttggacaaagagctcggccatactgcggtctacaaagaggcggagcttataggtcttccctgtgcaaagactgaggggagcccatgtggcgatagcgaagtcgttctgatagttcaccccatcacggtcgcgccagtcattgctctcgcggtcgtgaggcgtcgccttcgtgccgaagtctatgagtccgctcttggtgcggtccatagtgatgcgctccttctctaagtcaaggtagatggggagctcatcgccaagctcattgctgaggacgaggcctacacgagtcgtcttcgctgctggggtcagctcgagctcgagctcaaagctatcctcaagtcccttgagcgcatcgaggaggcgtacctcttcgccgatactctggggaaggctgagactgacctgctccttgcgcagggcttcgacctcctttgaagggcgggcccctacatagcttgtgccgtccttcgtgaagaggaagagatcacgaggtaggccgttcatgcctcgtgtctgcttgaagggggtgacgttggcgtactgccagttgctcacccaggggatgccgatggtgcgggcgcctgtgttgtggaaggtaaccagcgcatagtggtccttcccgaagtccagccagtgggcgatctcgggcgccgtctcggggacgaactccttgccatcgaaggtgccgacgaagtactcggtagcactgccaccgaaggcacagcccggattgatgttgacgatcatcacccacttctccttacccgtcgtctcatcggtgagctggaagaagtcggggcactcaaactggttggggcgtgctccgtagccttcgccgaaggcactcacgtagtcccacttcttcagatcctgagagcggtagaagcgcatctccttgtcagctgagacgatcatgtaccagctcttctcgggagtgtaccagaagaccttggggtcacggaagtccgagacgccatcgaagggcgtgagaatggggttgccagcgtacttcgtgaaggtcttcccattgtcgaggctgtaggccaagcactgggcttgccactgcttccccgcatgcgtattgtgagccgtgtagtaggcgaggatggcatccttgccgaagcccgctgtcccttgcttgtcgaggatggcgttccccgagaagatgtgcccgagggtgtcgcgtgctaaggcgagatcgtggtgctcccagtgaatgaggtcgcgtgaggagctgtgcccccagtacatattgccccacttcaagccatagggattgtactgatagtagagatggtagacgccgtccttgtagatcatgccgttggggtcgttcatccagccataggtagggctgtgatgataggcagggcgataatagtccttggcggaggtgtcgaaggtatcggcgagctgaatcttctcatagctaatcgccgtcctatcaagaccgatgatctctaccgtcgcaggactcttgccttcgggcaaggcgagggggacgtagtagtcgatgctatcgacggccagacggatgtcgagccacgtatcctcggggcggtcgcctacgaggcgtacctgcacctcgggctgactctcttcgatggggagaaggaggtagcgctgtgggctattgatctcaatgcgggtcagcgtgtcgttggggtggagtatctccatagtgggtgagttggatttctttgagcagctgatgctgagggcaagcagccgcgagtagagcggtaagcttacgttatataataatgtatagaggcaagggtggggagactacgcgacgcgattgaggtcagtacgtccagcgaggaagcgcacgacattctccagcatctccgcattcatatctcgtcgggcgtcagccgtttgggtccctgtgtgtggggtcatacacacgttgtcgagggtgcagagcgtggggtgggggttgtcctggttctcgaagacgtccagccctgccgctgcgatgtagcccgtctgaagtgccttcacgagggcctcttcgtcgacgacggcaccacgggcggtattgatgaagatagcggtaggcttcatcagtgccagctcccgctctccgatgaagtggtgcgtctctgagctgtagggcgtgtgaatcgagatgaagtcggagttgaagagtagctcatccagcggggcataggtaataccttggcgagcctcctcgtctgcactcagtggggtgcgcttgtagtagaggatcttcataccgaaggcgcgagcgcgctcagcgacggctgaagcgatacgtccgtagccgatgagccccagcgtcttgcttgcaaggtgcatgccgaggtagcccatgcggccgatggtcggacgcttgccaggtgtctggcggatgaggcggtcaagttcgctgacacggcgagcacagtcgagcatgagtgccagagtaagctccgtcgtcgggatgatcaccgcctgaggcgtattggtcacgacgatacggtgggcgcgagcgtagtcgatatcgatgttgttgaagccgacgccgaagttggctatgaggcggagcttcgacccatgctgcaggagttcggctcgtgctgggtagtcgaaggaggtacagaggacgtcagcctcgggaaggagctgacatagctcttcgtgggtgaagtcccgtccatgtggggggcggatgacttcgtgctcagcgccgatcttctcaaagccttcgtcgaccgtgtcgaaggccaccaatatcttagccataatcttagtgcgatgtagggaggtaaatactcccactaaggtacggaataagcaggatataagagccttttgcgcaaggggtgctttatcgtgcgtattcctcttatccagcggagggaaaagtgtccttctcgtgaagaataaagcgccttcacgtagtggttttcctgcatctacgcacgtagtcttaaagaccaggcacgtaaatccaaatatccacgtacgtagatttatcgtccacgtacgtagcccgaacttatctgccactcgtccacaacttttatccatacgcggagcaacaacctgatataggtcggcgtgatgacctatataggttcacccagtgatcaatataggctgccgttaccttcccatagagaaggcaactcggatgttgtggaggtatggcgcctgctcttatattgaggtgcttgtggggctccgcctcttgatcctccttcagcgcctgtgagcgtgtcggctcttgaggaaagaggtggcgtgtctaactgacagtatatcagctgtggtgtgttgatcaggggggacttgataccttccctttagcaggagatttggctgtgtggaagggtaaggatggggtatgatgcagccctcttttgctcccttccccgtacgatactacggcggggaaacgtaacgtgaaggtgctaagtggcggatattacggaaaaatcggctatttttgtgggcatattgtgccctataacaaaggaaataagatacaatcaattaagtaatacaacacgatgcaaaacaaaggatttgtgactttcgtcacagtgagcttggctttgatctgtgcgttttacctgtccttctcgctcattactaaccactacgatggtaaggcggagaagatgggcgaagtcgcagggaaggcttatctcgactccatggctaacgagaaggtgttcctcggatacaccctcaaggaagctcgcaagcaacagatcggcctggggctcgacctcaagggcgggatgaacgttatcctcaagcttaatgctggtgacctcgtcaagagcctcgcaggcaacaccgatgaccccaatttccagaaggccatccaggctgcttcgaagagcacttcacagggcaactacatcgatcagttcgtagccgagtataagaagctctccccaggggtaaaccttgcggtcgtcttcggctcgggagacctacgtgaccagatcaatccctctaccacggaggataaggtcatcgagctcctgaaggagaagtacaacagcgctgtcgaagcctcattcaatgtcctgagtacgcgtatcgaccgcttcggtgtcgtcgctcctaacctccagcgtctcgagggtcagggccgtatcctcgtcgagctccctggtgtcaaggatcctgagcgtgtacgcgaacttttgcagcgtagtgctaacctccagttctggcgcacctatacctttgatgaagtagctaacgatctggctggcctcagcgatcgtctgctcgctctcggtgctccagctgctcgccccatccccgtagctgctgactcggtagccgctaatgacagcacggctcacgatagcgctgctctcgtagctcctgctcctgccgcagctccttcgcagctcgcttctattgataccctcgctaagtacctccagctcggaggccgtggcggtgctaccgtcggtctcgctcaggaccgcgatcgcaacaagatcgactcgctcctggcgctggctactgaatatcacctcctgcctgaggacctcaccctgctctggggtgctaagcccatccaggatcccaagacgcgtaagctcaccaatatctatgagctgtacgctatccgcacgaaccgctcgatgaagcccgacctctcgggggacgtcgtcacttcggctaaggctgacgttgaccacaaccgccttggtagcgctgagcctcaggtctctatgtctatgaatcaggaaggtgctcagatctgggctcgcctgacgaaggaaagcatcggccgctctatcgctatcgtcctcgacggtgtcgtctactctgcgcctaacgtcaacaacgagatcactggtggtaactcctctatcatggggaacttcaccatcgaagaagcgaatgacctggcaaacgtactgaactctggtaagatggagacgagcgtcgtcatcgagcaggagaacgtcgtcggtcctaccctcggtaaggcttctatccaggctggtatcatctccttcgccattgcacttgtcctcctgatggtctacatgtgcctggcttatggcttcatccctggtatgatcgccaacctcgcactcatcgtcaacagcttcttcacgctcggtatcctcgcttcgttcaacgccgtcctcaccctctcgggtattgccggtcttgtcctcacgctcggtatggcggtcgacgcgaacgtgcttatcaatgagcgtatcaaggaagagctgcgcaacggcaagggtatgacccgcgctatcgccgacggttatggcaatgccttcagcgctatcttcgactcgaacctcacgacgatcatcaccggtgtcgtcctcttctacttcggtgcaggacctatccgtggcttcgctacgaccctgatcatcggtcttatctcctccttcatcacggcggtcttcctcacccgtatggtcttcgaagctctggacaagcgccacaagctcgacaacgtgacctacacgacggcgatgacgaagaacctcctcgtgaaccccacgtacaacttcctcggggctcgcatgaagggttacctcctgcccatcgtcctcatcatcgctggtcttgtcggcttcttcacggtcggtctgaacaacggtatcgagttctcgggtggtcgtaactacatcatcaagttcgaccagaaggtcgacaaccagcaggtccgcgagaagctcgctcctcagctcgatcagaagctcgtcctcaccgctatcggtaccgagggtgaccagatccgcgtgtctacgaactacctcatcgaagactccggcgaggctgtcgaagatcagatcaaggataagctctatcagggtctgaatagcttctacaagacgaagccctcaaaggctgacttcgatagctacatcgtcagctcgcagaaggtaagcgccagcatgtctaacgacatcaagacgcaggccctcatcgcagtcggcctctcgctcctcttcatggcgatctacatcctcatccgcttccgcaatgtcgccttctctatcggtgcctttgcttcggtcacggtgacgacgctgatgatcatcgccatctacgtccttctctggaaggtcatgcccttcaccatggaggtcgaccagaacttcatcgcggcgcttctggcgatcatcggttacgccatcaatgacgtcgtgatcgtcttcgaccgtatccgcgaagaagtgggcaaccatcctcaggctgaccgcttccaggtcatcaacggcgctctgaactctacgctctctcgtacgctgaatacgtccttcacgacgctgctcgtgatgctgatcgtcttcgccttcggcggtgctacgatgcgtagcttcaccttcgccatcctcctgggtgtcgtcttcggtacgtactgcacgctcttcgtcgctacgcctatcgcttacgaagtcgctaagcgtcgtagcctcaaggcagctgccaagtaatcgccactcccattcataggcaagggccccggctggtatccagtcggggcccttcttttgtccgaaggcggagcatcctgcctcggcagggagaagcattttcctgcggaggaaaaatatcttccctgcggagggaaatttatcgccgtgcgcacggcggtaaatttctatgcgcacaaaaaaatattttcgtgcgcacgaaaatctgactaccttcgcatggcgttataatgctttgtataacagttgattaatctctcgcgctggacgtcccattttgagggcgaaaagtaggctactttggggcgcacaaaagcccctttttaccatcgtatggatcacgctaagaccgccctcatcacgggggcttccagtgggctcggagaagcttatgcccgcctgcatgcttccttggggggcaaccttatccttgtcgctcgccgtgaggagcgcctgctcgctctcaaggccgagctggagcaagcccatcacgtcactgtccacgtcctcgcgaaggaccttgctgagcccgacgcacctgcctcactcttcgccgaagtggagcgccttggcctctctgttgactacctcatcaataatgcagggctgggcggacaagggagccttgccgagcgctctcttgaggatgatgctaacctgctggccgtagatatcgccgcgctgacggcgctgacaaagctcttcctgccgagcttcatcacgcgaggaagtgggcgcatcctcaatgtctcttcgattgcctcgctcgtcccagggccatggcaagccacgtacttcgcagcgaaggcctacgtcacatcgctgaccttggcccttagtgaagagctgcggggaacgggcgtcacggcgacggtcgtcctgcctggcgggatgcgcacgggcttcgaagccgccgcgaagctcgaaggtacgggccttgcagcccagcttacccaaagccccgacgatgtggcacgccgtagctacgaggcgatgctccgaggccgaaggaagctcatcgcaggcacgccacttctgcagcggctcctgctccgtctggtgccctttgccccgacggccttcgtcctccgtgttgtcgcccgtctccacaagcgctgaagcgcctataaccgacataacgcacctcgccccgctacggaagcctgacggctcggtagcggggcgaggtgcgttgatatggttggggcgagggctaagctctcagaaggagcatggcaccgatgaggagggcgaggaagaagacgttgcgtgccgtggcgcagagcgtcttgttgagctcgctaccttcggactcctgcagctggcggtgcgtcatcgagaagacgacgacgtagggcagcatgaggagcatcccccagaagctatagatggggtagaggaagcccatcgagagcagcccgcaggtgaggtagaagcgtggcgcgaagtcacggcccatacgcacgatgagcgtgcgcttgccagccttacggtcttcgtcgatgtcgcggtagttattcacgatgaggatattcacgctcgctagaccgatcgccgtagctaagtgccacagcacgggatcagcgatcgtcccacgtaggatgaagaagctcgtcaccacaggcacccagccgaagaagatcagcaccgccaaatcgcccagaccgtgataggagagcggataaggcccgcccgagtaggcgaagatgcctagcccgacagccaaccccacgagtagcagccaccacgaggtgagcgccacgagtgtgataccgctggcgaggaagacaaagaggctgacgtatagcgcacggcgtacctcgccttcggtgagaagtcccttagagagggggcggagtggccctgtgcgctcctcggtgtcggcgcccttcttgaagtcaatgaggtcgttggctatgttactcccgatctgagcactgatggcgacgacgagaagcagtgccgtgcgtagcggatcgataggcccgatgaaggccgcgtagaagatcgccacgaggacggcgctaagccccgagagtagggtgcgtgggcgagtaagccccagccagagctgtgtgcgggtaggctgcgaggaagccatactacttatctgctcctttcttggcgtccttagagccgaagaggtggtcgctcagggcgaggagcgtgcggcgcttgtccgcagcctcgacgagtacggtgaggttgtagtcgctaccaccgtaggagatcatgtgcacggggatctcgctgagggcgttcaggatctgcgcctcgaagcccacgttgtcccactccatatcgccgacgacacagacgatggtcatgtcatgctcgacgtcgatgctacccaagctctggaggctgtggcgcaggtcatcggggagcgtgctgcgctcgatggtgagggagatagaggcttcggtcgaagcgatcatatcgatggggatgcagtggtgctcgaagagtgcaaagacctttcccatgaagctccagtgggagagctgatgattgctgcggatgcggatcatcgtgatgttgtccttcgctgccacggccttgatcatatccttgtcggtatcgagggagatgagcgtacctggggcatcgggcgccatcgtattcagtagacgcacggggatgtggcggcgcttggcgggctggatgcaagtggggtgaaggatcttcgctccgaagtatgccagctcagaggcttcctcgaagtggaggcgacgtacgggagacgtagcatcgacgatacgggggtcgttgttgtgcatgccatcgatatccgtccagatctggatctcgtcgacctcgagggcggcgccgatgagcgtggcggtatagtcgctacccccgcgctgcaggttgtcgatatcgccgaaggcattgcggcagatgtagccctccgtgatgaagagctgcgtaccctcgggtgctcgcttgatgagctccgagagatgggcttggatatagtcttcgtcgggctcagcctgcttattggtacgcatgtactccagtgcagggaggccgactgcacgcacgcctcgatcctcgaggtgacgcagcatcatcgctgtgctaaggagctcaccacgtgccaggattttcttctcgtcaaagagcgtgaaggtatccgagtagcagagctgctcgaggaagaagaacgtctcattgaccaaggtccaggcacggtcgtagctgtgcttgtcggggaagagcagctgcgtctcttgctcgtacttgtgcttgagcttcgtgaggatggtgagggcctcgtggcggtgatgcgccatgagctggtgcccgatctctacgagggcgtttgtcgtaccggccatagccgagaggacaacaatcttaggctcatcggtagctgtgatgaggtcagctacatgggctatgcgctgggcagaggcaacagaggtgcctccgaacttcattactttcaacggcttcgtgtcttaggggatacgtgtcgagggaatggggctgtacgcttgctcggggcttagagcgcatcgagggcaatacagcgagcggggtagtactcgaggacctgacggttgtgcgtggccatgatgacggctgtaccacgctccttggtgaggcggtgcaggagctcggcgatagccaagccattctctgcatcgaggttccccgtaggctcgtcggcgaggatgagctcgggacgaccgatgagggcacgggcgatggcgacacgctgctgctcaccaccagagagttcgtggggatacttatagctctttgtctcaaggccgacatcctggagcgcctcgttgatgaggctctcgcgttcgctacttcggctgacaccgaaggcacgcagcacgatatcgaggttgtcatgcacggtctggtcgggcaggagctggaagttctggaagacgatgccaaggcgacggcgtagcttcggtagctccttgctcttgatgcgagagaggtcgaagcccatgacgttggccttccccttggtgagggggacttcggcggagatcgtcttcagtagggtactcttccccgagcctacagggccggtgaggtagacgaattcgcctgcggcaacctgcagatccagctgctcgaagaggatatgttcgtggcgggcgatctggacgccttggaagtccagtagccacttcttttcagccataggtcttatctgtataactatttacctgcaaagatacgcaaacgtgcccatgctggggctatggggaggagctatgtcggtgatctggtcaaaatcccttcgggtatcgtggcgtcgcgtatgcggggacttcttccccttaggctctcgtctacggtctcccttgtgaaggctgggcttcgtactgctatacgttcgcttccctctctgtatcggtccgagctgtagaggggcgtataaattcttctgagaatcaggtggaatacttctattctcctgctgcttttcttcttcggcaatatagctttcttcgtgtctacgtacgtggatataaaatccaggtacgtagtcgctatgatccacgtaggtggactttaagactacgtacatagatagcgatatagcactatagcttagcccctttatttccactgggatgtaagtattcttcagaggaatgctacctttttctcaatagcgatgctgctctgtcttataggagcaggaaggcgcacgcgaggaagtcgatgcgacttcttgcatatataaaagctttgtgctacctttgcagtgcttttacaagaggcggcgagatagctcagctggttagagcgtcggattcataatccgaaggtcgggggttcaagtccccctctcgctacgaaacacagacgatatacctacgaggtgtgtcgtctttttcttttatacaaaacacgggagcgctccagcaatatcgctggggtgctcccgtgttttgcgtcaagacatccgagtcgtggcggcttagtcgcggctggcttcaagggtgaaggctgcggactgtacctcgccagggaagggcggattgcacttgctgagagtgagtgtgaggcgctgcatgcgggggaaggtcgcgaagaggcgctcgctgatacgcccgacgacatgctccaagaggcgtgaggggatagccatctcggccttgacgacctcgtagacgtcggcatagctgatggtctcctccagctcgtcactgcggacactcccagctacatcagcccagaaggtgagctcgacgacgaactgattgccgacacgctgctcctgtgggaagacgccgtggtaggcgtagaagcgcatctcgtgcagggtgatcttcattgcttcgatcttcattggcttatcgcggggtaagggaggttagtaatgtttgtgggagctgggctctatatgaatagcgatgtgggtcgtcgtcccatagcgggcacgtagctcgcgctcgatgattagggtgatgtcgtgcccctcggctacactcatgcgcccatcgacaaggaggtcgatctcgatagcgtagctcccgccgatgctacgggtacgcatgcggtgaatgccctcgacacggtgcgtagagaggacgatctccataatttccccctcgacctcggggctcaggcattcctcggtcagctcattgaaggcggggcgaaggacgctccagcctatgtggatgatgaagagactcacgacgcctgcagccagtggctcgaggaagagccagcgctcgccgaggaagatagccccagcgataccgatgagtacggcgatgagtgccagcgtatcactgcggtggtcgagggccttggccttgagtgccgagctcttgagcagccctgcccactggtaggtatagcggtagaggaagagcttgatcagaagggagacgaaggcgacgataagcgtcagacggctgggacggggtagctggagcgtacccatccaaaggccgatgatcgagatgatgctattgtagaggaggaggacgccgacgctgatcatgacgaccgccatgacgactgaggcgagcgtctcgaacttcccatgcccgtagtgatgatccttatcctgaggcttgcccgagatccggatgaagatgagggcaatgatgtcggtgaggaagtcggagatcgagttgatcgcctctgctatcatcgcgctactatggcctacgatcccgacgaagagcttcaggagcacgaggagggcgttggaagcactgccgaggagcgtcacacgcaggatcttcttcgtgcgctcggggtaggtgcttttattaggcaccatactgcttgctgatgagacgggccaaggcttcaccctgcttgatgcggtcggggatgccgatgccgtcacggatcgccccagctaagtgaagacctggatagcgctcttcaagctgcgcgattcgctcaaagcgtgctcctgaggaggcttcatattgggggatagccaagcggtggcggaagatgtgcagtaggtcgggctcgttcgtaatcccgagaaggcgctgcagacgctcacggacgagggcctcgatggcttcgtctgagtactcgatgacctctggggctcgcatccctccgaggaagatagagaggagtgtgccacccttaggtgcgcgctcttcgaagcatgctgacggatgaaggatacctaagagttcgccatcttcgtgcgaggggaccagaccaccgaaggcatggaagtgggggagcttcgtcgcacgcataccccacgctacttgcacgatgggcgcatagcgaagggccgtaataggcgcaaggtcttcagtggagaggaagggaagtaggcaggggagggcgggtgcaggtgccgtcgtgatgacgtggcgagctcggagcatgcgtgtagtgccgtccgtcgtgaactgaacttcatagagcccctctgcggtgcgtgtgatatgacagccttcggcagagtaggagaagtgctccctcccgatatgatttgcaagggcgtgtgtgagctgggatagcccgcccgaggtggagaagatctgcttcgtcacactctgagcctctgcatccttcggcgctcgtgccttggcgatagccccacggatgaagcttccatgctgctcctcgagggcgtagagcttgggaagggcgtagcgcgtcacgagacgatgcgggtcgccagcgtagatgcccccgatgaagggatcgacagcatagtcgaggaagctcttccccagtcggcgcacgaccagctctgcgatcgactcgttctccttccgaccacgggcacggaagggctcaaggaggatgcccagcttatcacgcatcgagaagagtggtgtcttcagcccagagagcggtgaggaggggagggggaggaaggtctgtccttcgcctgcgcgcttccccatactcttgaggatgaggcggcgattggcctcaggtgaagcggtgcacatgagatctgggaaggcagcgaagaggcgagggacggcagcatgactgatgatgcccgtcgtaggtcccgactcaaagatgaagcccccttcgctgtggctctcgatgacgcccccaggtcgatcacgttgctcgacgaggtgtaagctgagtccagcctccttcagatggaaggctgcggtgaggcccgtcaggccagcacctatgatgactacgtcaatcggagtatcggggaggttattcgtcatgtggcttgatcctgcttcacttgtgcgaagcattggcaaagataacgaacatgctcaagatagggccgaagggtacatggtgggagctcgtttctgtggtagcctattgtcccattatcgctctgtcgtcgggtagctatggaggatataggatcaaaggcaagcccctcacccatagcagatactacgggcgaggggctgatgcttagtggattcgtccgaaggacggaggagggttacttggcctcgagcttaggctggatgaagaacttctcgatgccgatgaacgtaccttgggtgatctggcgtgagcttgagcggacgaagccataggaagcccagtactgctccgaggagatcttgctcttctccttgaagatgagcttgccgtcatggttgacggagatcaagacgggttcacgtgtcccgatgatgtaggtcttgtgctcagcagtgaagtcatcggcagcgaggacgctcatgatgtagatgttcttgccgctggctgggtctgtcgccgtcttcaccaccttcccgttgaggagctccaggccttgaccaggcgtgaatgcagcctcccatgtgtaggtgccgtcgatgatgaactgtgcctgcgtgtcgctgaccttcttgatctccacgtcggagcttaggggtaccatcgtccccgtagcagcatccagcgtcatagagtgctgagtgtactgccctacgatgtcagcgagatcaacctgcgtgacctgaagtgagtcaacgagaccaacccccttggcgatgatccagcccgtgcgggggcggcccgtggtgttctctgcgacgatgacgcgaagctgctgatccttgggctccagctggatccagtcggctgaggtagtgtaggtgacggtgatatttgagggtgccttgatcgtcttgtcgatggcagcatcccccccgatcatcgcttgctccttcggcagaccgaagatgatgccggcctgcatgatgttgatcgcgatggagtctcccttgctgtccttgaggaccagcgaggcgttgcgtgactggggattgatattgtcggtcgaggtaagacggatcgtcgcaccttcctgagctacctgaagccaagaggcggagctgtaggccttcgcaggagccttgtcaagacgtacggtcgccgtagaggactctacggggaggtaggtcttagcctccaggacggagaagtccacctggctcagtcgaggtacatcctgctgcttcttgcacgagctaccaaggctcagcagtccgagagcagcgaggaggattaagcttattctcttcatgagtattgtaatcatctgaattgagagaggtacatacgaggctggcactaaggctgcttcttgatgtactggatattctcgatagcgatcggcatgacgaggttgcccttactatcgacgagcggagtattgaggtcttcaccgtaggcgataccatagaaggagtcgaccttaccatcggcgagctcggtacccttagcgacggcttgctggagatcttcatcccaagtgaaggtgatgctatggagctcagcggcgaggagcttgcgcccatcagccagtgatgctggtacgaggatgataccaccagcatatctattcgtcgggtcgtgcagagcctgtccctggaagctgatcgtacccgtggtagcatcgtaggggagcaccatcttgtagctgactccgtagaaggtgaggacagccgagagggtattggctcgctcaccagctgagagggtgagggtcgtaggcttacgccagccacggacggggttgtgtcggagcgtccatgtgccgtaccagaagtcgataggcttatagctcttggggaggaagagcttcgcgacgaggtcgcccgaggtgaactgctgggcttcgccatcccaagtgaaggtgcggtagctcttgccttcgactacgatggggctctgtagcgtgatgcccgtagcggtgaagttgaacggcgtgtcgaagctgcgctcaccgatcttgaccgagaggcgacgggcgtctccacggatctcaccctgagccagctccttgctcccgagagagaagtcgaaggtgcttgctgtcatcccttcgcggacattgaggataccgaggatctgctcctcgatactgctgtcgtcggggatgcgtacgaggcgcatctcattgccccatttcttaccgaggaggcgtaccgtatcagcggtagctgagaggatggcgaactcatagtccccttggatcccctcgggataaccgagtgatgcggaggccagtgagtgaatcacctcattgtaggtggggaaggtcagcacagggccttggtcgcggacgatcgagtactcgctggtagcctgtagctcgggatctacgttgtcaccagccatcgtcacgtgaccgttctcgaacttcatcaggagcgtgaagccaggacccgagtagtctcggccagcgtagtactccatccgccagcccttgggcgcagcttcgagaagggctttctcctcagcgatgagggcgtcgatgcgagctgctgcaggcttgtcgaagatctccttattgtccttgaggcaggaggggagcatgaagctcagtagccccaggaggatatatatataggtaggacgcatgattagtagagcttagttaggtctaatgtagcgatctggccaccacggcgtaggacgacgtcacgcaggtcatcgaggtcaagcttccacgagtcgcgggtatagtccttgacgcgctggagcttgcgctggatgagtgcggcaccagcagagcctgcattattgaggatctgctgccactgctggggcgtgtaggtgacgtagtaggagagcatctctgcgaagtcctctgcatcattctgcatcgcgtagggcgatacgaagccagcacgattggctgcacgctcggactggttgaaccagtctccactgacgtagcccgacttcgtgatgagagcaaagtccgtgctgtaaggcttcttctgattgagaatgtgggtgaactcgtgatgcatcgtgtggaagtagtaggtcgtcatcgtctcgtagtcggccagagcttggtcggtgagcgaattgaccttccctaagatgaccttgtagccaccatcggcactaccgacgacctcagtgcgctgacgcgtgtagccaggagtaccgatagctacgaggatacgtggggcattgagcttcatgaactcaggcccgaggacctcggcataggcatcgaaccagaggtacttcgtgatgatcgcgagcttggctgtcttagccgagtcggcggggataaagtgatagctgaggtccgtctcggagtcctcgagcttgtatttgaagcggatattgtatggactgcggtagttcacgtccagccactgctcgaagtcattgagcttctccgaggtcgtggggaagatcgtgggatccttcggctggtcatcggagcaggagatgatgcctacggtgaggagtagcccgatgagtccttgatatatgtagttcataggtccttcgtcgctatgttaatgttgggaagctcggggattagcttcgagctgtgcagagatgacgtcctgagggagctggacggccagacgtgggtcgcgtgcctccatcttgtcggtcacagcctcgacgacattgctgacgttcacacgacggcggtagatcgtgatgccgtagcgcttgacgtcctgcatgcggagaccttcgtggatggtgatgaggcggcggagctgaaggatagcctgcagaagaggctcctgagtctccatattgagggcgggcgttgtgtgaagctccttcttaggagtaggcttctcaggcgtatagtacttgatgccttggtagaagtctttgatctgctgaagggtcagctgtacactgcgcttcgtgaaggcgctgagctcgatgttgaggtcagcgagggcctcgtcatagcgctgcagaagggccttcgcctcggcacgtaccatgagcgtctcatcagtggtgaaggtagcataggtcgagtaggggataccgatgcctgctacacggtcgatgtacttcggcgtgtaggggagcttgtggagggcgtacttagataccccgttgttgttcaccacgacgtagttcatcacatcgccactggcaccccatgggccatcggcctggagggtctcggtggtggagataagtgcaccatgggcgtacttactaccacgcaggatggggatgctgacgccaccccattcggtagctaccgtctgcaggaggatatttgccttgacagaagactggatataggcgttaggctgtacattgcccgagagtccctgcttgctccacgaggcccagtcacgtaggtcggcacgtgggttcgagcccagagcggcatcagcgtgctcaatagccttggcatactgacgggcatagaggtagaagcgcgcagcaaaggcatgagcagcctgagcggtgaagtggtacttcggcttaccatagttcgctgaattgatatcctgcaggccctcggtgaggtcttgctcgatgtgcttgtagagcgcttcgagcgtgcctcgatgatggagggtacgcccaggatgctcctcaggctcggtaggataaggcaggccatagtcggaggctgccgtctcgggagcataggcttggcagaagacattcgccagctggaacatcgagtaggcgcggcatagcttggcttcggcgacctgactggcgtaggcatccttattgcttacgccagcgacgtgcttgagcacctcattgcagacagtgatcgcagtatagtgtgcgtcccagagctgctgaggggtctcctgctcgcggatctcggagatatcgctccagcgataggcctgctcctggaaggggctgatagcgctccacgaggtgtagtcgtgctcgtcgctattgtcggagtacatctccagcaggtaggctgcatgggcatcgggataagccgatacgaggaacttcgccgcatcctcaggggtgtgtagctccatgcggttgtcggggtacttgtcgaggtacttaccgcagctcgagaagagcagtgccagcgagaggactgaggtgatgatatgtttcttcttcattggtgtcgatgcgttagagtccaagcttcagggtgagagtgaactgtcggggcgtaggcgaagctaccccaccgatgttgaagaactctgggtcttggccattgagcttcttgtctgcatacaggaggaagaggttcgtagcctgtaccttgaccgaagcgctacgcagaggcgtacgcttgatcagtcttgtgggcaggtcgtaggcgagggagatctccttgaggcggatgaagtcgcccttggcgatacgcgccgtagagtagttgtagccgttgtaggcgtagcgcagattattgttggtagcatactgacgacggctcaggatggtggggatgtccgtacgagcctcctcgccagcagcctgccagcggttgatgaaggcatgcgtcatcgaggccatatccccgtagtaagccttgaacttaggatcaagtcggacgacattgccgaaggcataggtgaggaatacgttgagatggagacccttgtaggagagcgtattgccgagtgagcccgtgtgggtggggtcggtaggaccttcgtacttgaggtactcggtgtggttacgctcctggaagttgatgttgtcggtcgtcacctcacccttctcgttgatgagctgggggagaccttggttattgaggccgacgaaggggatagagaagagcgcacgtgcagggtagcccttcttagcgaagccgttcccactgacaaggtcgatcatacgcccttggttgtagagcttcgtgatctccgagtgcgtgtaggagtagatgaagcttgtcgtccagttgaagtcctttgtcttgatgttctgcgaggtgatgctgagctcaagaccactggacatcatctctgcgacgttggcaggacggatgatcgtaccaccgataccctgcgtgatcataggccccatttcatcgaagttacgacgggtgtaggcatcgaaggagaggctgaggcgatcatcgaagagccctgcgtcgaagccagcgttgagctcgttcttcttttcgtaggtcaggtcagcattccccagctgctcaataccgatcccaggctcttggtcttcggcgaagaggcggaaggggatgtacgacttgaggatcgtcgtcgagctgctataggaggggtcaggaggtgtccccgtgaggctataggagagacggagcgtgaggtggctcagaggcttgagcttctggaagaagtcttcctcgtgcatgttccatgcgccagagacgttccacgtagacatccagcgagcattgctgctacgcccgagctgattcgagccttcgtagcggtaggtgccgttgatgacatagcgccccttataggagtaggtcgcattgctgtagaaggctaccgtacgatagttcgtgttgttgaggttgtagtagctattgccgtcctctacctgcttcttgaagtactggtaggggtagaagggcgtctctccagcggcgtactgaagcccccagcccgtgaaggcggtgcggttgcgctggatattggtcgtctcaagaccgccgaagaggttgagcgtgtggactccgaaggtacggttatagttcgccgtagcgcggaagtcgtagttgctcatgcggttctcacccttgtgcatgaagccgccattaggcaggacagtgctggggagatcgtagggacgatcagggtcacggtagaggtacttgttggactctctgatgacgctgtttggcatggcgcggtaggccagtgcttggtttgagttgtcacgcacattgtgctgctgtgaggcagccgtatgcttgaaggccccgaggagggtcagctccagacctcggataggcttgaagcgcagctcagcttggaactttgcatcgagtacatccaggtcgatgtagttattctccagctcgttgaagatattgaacggggcgtagttcgccgtgtagtactctcgtgggtcgaggacacgcgaggtattcgtagcgtaggagtaggggttgatgtcgaagtcgcgcttgacctcaccacctacgacgtctacatcctgaccgagcgtaccaggcgcacgctgattacgataggaagcacccccgatgacattcagcgagaggctcttcagaaggtggtgcgtgacgttgaggttagcggtatatcgcttgacctgactctgcttgtaccatcctggatcgatgagggcggaggcagaggcatagtagttcgacttgctcgtaccaccgctcatgctcactgagtgggtctgcatgatggagggagagaagagctccttgaaccagtttgtattgcgtcgctcagcctgctggagatacgcgttctcggccttcgtcgtattgtcgagcaggaaggtgcgggtcttgggattgtacgtgttgatcagctcatacatcttaccatagatcccgtagtcactgccattgaggacctcggcgaagttcagccatcccttatcgcgtagctcgcggtagatactcatctgctgctgcgagttgaggatgtcgaagtcgcggtaggatggaatgaggcggctggtgaactcacccgtatagttgaagttggcctgaccttgcttccccttcttcgtcgtcacgacgatgacgcccgccatagcgcgtgcaccatagatagaggtggccgagccgtccttcagcacctggaagctctcgatgtcgtcggcattgagacccgcgatagcagagctgatgagcgtctcaggattccccgaagcgaggtcgtcagcacctacattagatacatcttctatgatgacaccgtcgacgacccagaggggcttggagctcccgtagatagaggtcgccccacgcacgcggatcttaggagctgtaccgaaggtccctgagacattctgtaccgagacccctgcggcgcgaccttcgagggcgcgggctgcatcgggtaccccgtcgagcttggctttgtcgccgccgagcttagcggaggctcccgtgaagaggcgcttgtctaccttggtgagtcccgtgacgacgaccttatctagcgtcttctctgagggctcgagtgtgatcttcatcttgtccttgataggcacctcttgggtgaggtaaccaatgtaggagatgcgcagggtcttagagcctgcgggtaccgtgatcttgaagctgccatccagccccacggttgtccccaccttgctatgttccttgacgatgatcgaggctccgatggcggcctcgttgtcgggggcggtgacgacggtgcccgtcaccacctgctgcgcgagcgcaggcaggaaccccaggagcagggtgaggaggagtaatgtacttttcctcattcgttcaatcaattgtataggtgtttgaataatttatgcttgtctgtatcccatggtaaaaagagacgagcgaccacctcactgcctacggctgggggggatcgctcattgcttgctgtccccgaggtggggaacagtgacgctatattatataatgtagagccatgacaaagggagctatcgtccgcaaccaaaggcggggagatagctatcgcattcgcttgtcaaagccgagggtgtgtcggtgttcttccagatacctcatgaattcacttttgtatcacaaggaaataatatgatctactatcagccacaaagctacataattattagatacaaagtagtgtgtgccgaatttttaggtagcgtattctcgtccaagctcacaaaggttctcataaatgacagcccttatagaagggaagctccaagctattcatagtgggggtaaaatgaaccagtactggtcgctgagttgaccagtactgcttggtggtgtgtaccagtactggtccgaagcccgaccagtactgctcgattgagtgaccagtactggttcaaaatcgagggtactattgaagcctgctatctgcttgcatagacgcatgtagatagcgggctaagtcgctctgtccctttgtggtgcttgctgcctttcagatcgataggtagcttagcggcggatgagctggaaggagagcagaaggctatctatgaggagaaggccttcggtgaggggagagggaaggcccagcaggaacttgagagcttcggtggcggcgatagagccgatgacggcgggagtggtcgccatcacggggaagggggcttgcgtggggcttggggcgtctcccttatctccctcggggaagaggtctcggtagcgtgagggtgagtcggggaggaagagtgccagctgtccgcaccacccctcgagcgaggcatagagccacgggatatggtgctctgaggcatagtgatcgaggaggaggcgtgtcgcttcgttgtcggtagcgtcaatgagaagctcgacctccccgatgaggcgggtggcattcgcctcggtgaggcgctcactgtaggccgtgatgtcgcagtggggattggctgcgcggagtcgctcggcagcgcactgcgccttgctcctacctacctcgtgcgtggtgtagagcgtctgacgggggaggttgctcactgagatactatcgtcatcgcatagtgtgagatgcccgacccccgctcccacaaggaggggcaggagagctgagcccagccctcctgctccgatgatggctacccgcttctcaataaggcgcatctgcccctcttccccgacttcggggaggctcatctgtcgggcgtagcgggtcttgaggttgtctatctcagtcgtgtccattgcttggggtcgtgcttttaatgggctgggaggtcagagccaactatcccagtccttccataccggctcatagcctgcactacgcaggtgggcggcgaactccgcgggagtacggctgtcgttaatgacgaactgctccagatcttcgctgctctccgcatagcccccgggctcggtgtggctcccagcactcatactcgtgatacccaagggaagaacgtgatcacggaaggaggctgactcacgcgtcgagagggagatctccacatgcggatcaaggagacggaaggccaagatgagctgcgtgatgccgaggtcgtcaatgggtgaggagggctcataagcccccactgcggggcgaagacgaggtagggagatagagtagcgggtctggcggtagcgctgacggaggtagcagagatgcagggcggtgaaggtgctatcggtgcgccagtcctcgagccctaagagggcaccgagcccaatcttctcgatacctgcttgggcgatgcggtcgggggtctcaagacggtagcggtagtcggccttcttccctcgggggtggtagctggggtagtgtgcctcgtggtaggtctcctgatagacgcagacatagtctacccccgcctcgtggagggcggtatattgctcggtcgtgaggggctggacctcgaggctgagctgggcgaagtgcgggcggatatgctcgacgacctgcaggtagtacttccatgagctggcacgaaggtcttcgccactgacgagcaggaggtggcggaagcccaaggccttgatggcctctacctcacggtcgatctcggagagcgtcagctggcgtcgtcggatcttgttctccacgctgaatccgcagtagacgcagctattggagcatacattagataggtagagcgggatatagagctggatcgtatgaccgaagcgctctacggtgaggcggtgcgcctcgtgtgccatttcctcgaggaggggaacggcagcaggtgagacgagtgccataaagtccgctatcgtgcggtgcggtgcagcgagggcgcgctggacgtccgctatcgtcttgctgtaaatctccctctgaagggtgtcgaagtcataggcccgtagcacatcataggccgtcgtgtcggtggtcatggctcgggagtgaagaggaaggcggtgaggggtgaggaggctaccgcttcgtgactctgtggggcgagcttagcgtcataggccatacgacctgcttcgaccccgagacggaaggcacgtgccatagctacgggatcttgtgctgtggcgatagccgtattgacaagtacagcatcagcacccatctccatacattcggcggcgtggctcgggctacctatgcccgcatcgatgacgacggggatggtgctctcagcgatgatgatacgtaggagggcacgggtgtccagcccgcgattcgtgccgataggtgctgccaggggcataacggtggcgcagcctacctcctcgagacgcttgcagagtacggggtctgcctgcacatagggtaggacgatgaagcctcgcttcaccagctcctcggcggcgcgtagcgtctcgatggggtcgggcatcaggtagcgagggtcggggtgcacctcgagcttgagccagttcgtctcaagggcttcgcgtcccagctctgcggcgaggatggcttcttcggcggtcttcgccccgctggtattggggaggagctggatgtgagggctgtcgaggggagctacgaggtcatcgctgtcggcatgctggagctcgacacgcttgagagcgagggtgacgagttcggtccccgaggcttcgacagcacgagccatgagggcgggggaggcgaacttccccgtaccgaggaagagtcgcgaatggaaggtcttgtctgctatggtaagcatagttgtcaggtgtattaaggtcggtcgtccgcagcgaggcgggcggtatggatgaggctgctactcatggcgacgccgtagagtccgagggcgtagagggcggggatatcctcgggggatacgctgccgatggcataagcagggagggggaaggcgtggagctggagagcacgatagccctcaagtcccaagatgggggcgagcttcttctttgtcgaggtgaagcggaaggggccgatgcccacgtagtcgatggggagcgtgcgtgccgtggcgaggtcttcggcgctgttgcacgtcagaccaatgagggcgtgctcacctaagagacgtcgggcctccgttgggggcatatctctctgtccgagatgtacgccatcggcacccgtgaggagcgcgatgtctactcggtcattgatgagtagggggacgccgtaggcatgacagagcgctaaggcttcgcgtgcggtatcgaggaaggtctcccacggggtgtccttcatgcgtagctccacgatatccgctaagccctgacgaaggatgaggtcggtctgctcgagggtctccgctgtggtggtagcgtgcgtgacgaacatccgtcggcctagtggcagtcgtcttacgggtacttccagccctcgcccaaggcggtagtgcatcgtcgcacgctgggctgcgtggagtgcctcttggtagtcttcgccccgagctaaggcagcgcacagcgtcgtagcatagaggcagcccgtgccatggcggtcttctccgaggcggggtgcggtgctctcgatgagccgaccatcaggaaggtaggccctgtcggtgacatcctcctccgtgcaaaaagcagacttcgcgatgacagcggtcgcagtacgctctgcccatttgcctggtatgctctccccgaagagctggcgggactcgtagtgattggggaggatgacgtctaccagctctgccacctcaaggaggctttcacgcctggcatcggggaggaggtctgcgcccgagctggtgcgtagtatcggatcccagacgatgcgacaagctgggaagagcgtgcgtatctcacggacgaggaggcgtagctggtggagcgaagcgatgagcccgatcttagctacctgcgggggcgactgcctacgaagagcacgtactgcctcgatgaggtctgtgtcagcgactgctgtgaggcgggtgaaggtcacggcatcctggcaggtgagtgccgtcacgatactataggcgcgtactcctaagcgtgcggcatgctgcatatccgctgtgagccctgcctctgccgtcgggtcgatgcccccgcagaggaggagtgtcggggtgcataacttctgcacccgctcggtgagcttatggagctgctgacttgcgaagtaccctaagagcgcgacaccagcgaagccctctttgataaagccttgggcattcgcctctccgacaccgcccagagcaatgagagagaaggggaagcgtgccgtgacggctcgcctcagctcgggcgtccaagggctatcattcccatagtcaggcttactgatgctcgctgcgacggggctcacataggcgtagtcaggacggaagggtaggcgctccagttcctctacactgtggcaactgacaccgacgatctgctcggggcgaagggcctccgtcgggcgctcacggagtgcactccagtcggctacggagaggtgcacaccgccgagcccccagtgtctcaccagctcgatgtggtgtgagaggacgcagcgactgcgtagctcacgagggatggagcggatgagtgcctcaagctcctctaccatggcgtcgggcttgcgtatatgtacgcgcccgacgccgagacggaggaggtgagcgatgcgcagggcttcgcctgtatcaccgagcgagggcggtgtgatggcgatgatctgctggggtagcataagggctatctatggtgactacatggggcttcggtgctgagtgcaagcccttcggaggggacagcagagcgtgactgcagtgcctgacggaaggagcggttcgcacgcatcgagcagaagtgctcaccacacattgagcagaagtgcttctccttgtgctcctcatcggggagggtctcatcgtggaactcctgagcacgctcggggtcgagtgccagatggaactggtctctccagcggaattcaaatcgcgctttactcatcgcatagtcacgcaggtaagccgtcgggtgtcccttcgccaggtctgcggcatgggcagcgagcttataggtcacgactccctcacggacgtcattgcgctcggggaggccgaggtgctccttctgcgtgacgtagcagagcatggcggtaccctgatgcccgatgatcgaggcaccgatagcccccgtgatgtggtcgtagccagcaccgatatcggagaccagcgggccgagggtgtagaagggggcttcatcgcagtcgaggagttcgcgcgtcatattctcggggatgaggtgcatagggatatgcccagggccctcgatcatcacctgcacgtggtagcgagcagcgatgcgattgagttcgccgagagtcttcagctctgccatctgtgccgcatcgttggcgtcatggatgcagcctggacgcaggccatcgccgagggagagggagacatcgtagcgggcagctatctgacagatctcttcaaagtgggtgtagaggaagctctcctcatcgtgctcggtgcaccagcccgccatgatcgcaccgccacggctgacgatacccgtaaggcgcttgagggtcagcgggatgtgctccttacgtagccctgcatggatggtgaagtagtcgacaccctgctccgcctgctcgatgagggtatcgcgatagatctcccagctgaggtcgtaggtcttgccgtggaccttctccagtgcttggtagagggggacggtaccgatgggtacggggctattgcggatgatccactcgcgcgtctcgtggatgtgacgcccggtggagagatccatcacggtgtcggcgccccagcgggtagcccatacggccttctccacctcctcagcgatactgctggtgacggcggagttgccgatattggcattgaccttacagaggaagttgcgcccgatgatcatgggttcgagctcagggtgattgatgttggctgggatgatggcgcgccctcgggcgatctcttcacggacaaattctggggtcacgtatggggggatctctgcgcccagcgggtcacccgccatggcgtgacgctccttggcctcgtcgatgagctggttctcacgtatcgccacgtactccatctcctcggtgatgatgccttggctggcatagtagcgctgggtgatacagtgctccttcgctactcgtgggtggagggagatatgacggtagcgcaggccgtcaagggcgcgctgctggagtcgtgagcgggtgtattcactgccgagctcttcgctacgggtcgtatcgtctcggcggtcgatccacggctcgcgtaggcgtggtaagcccgcctcgaggtctacccgataggcgctgtcggtgtacgggccgcctgtatcgtagacgacgacaggggcattgggggtacggctcccatcctcattgtaggtgtcggagagggcgatgcggcgcatgccgacgcgcagctcggggaagagctggccaggtacatagatcttctccgagccgatgagtgggccgtgagtaaggacatctttgatcttcataatagtaggggaatgtgtgtgtcgtggaaagggtagggcttagcctccgaaggtcggtcggatgaggaggagggtgtcgccctcctcgagctggtaggtggctaaggctgtgcggggtaccaagcgctcattgacggcaatagccgagcgaggtggtaggtcgatcgctgcgaaggcaagggcttcggggatcgtgcatacatgggggagcgtggtgggagctccgttgatcaggatcttcatcgtaagtaactctatcgtcatggtgtgatgaggaagtgcgaagtgacgacacacctccagcgagcctactaccacaaaggggcagacactctctggggaactatgacgagccgacgggctcaatcacagcgcgagtaacggaagatcttagaggatgagcggcgggatatcgcctccactctctgcctacgccagcattatctggatcaggtcttcgggtataatctcagcacagcgtggacttgtgtcctacgccagcacccctttgagttgctctacggacaaaggtaggccttttcttgataccgccaagagcgggctttgacaagccctttaatagtgggcttttctacgatatcatagagggggtggtgtcgacctatattggtcggtgggtgaaccaatattggtctgcgagcgaacctatattggtcgatagtatgaacctatattggtccgcgcacgaaccaatataggactgcttacaaaccaatatgagacagttgagcagttattcagctaaggcatcgtacgcccagctccccgatatgcccctcccaagagatacgcaagcccttcgcctcatcgcgggtattcctcttatccagcggagggaaaagtgctattctcatggagaaaaagtgcctttccgcagtggtattcttctatctatgcacgtagtcttaaagaccaggcacgcaaatccaaatatccacgtacgtagatattagagccacgcacgtagcccaaacttatctgccactcgtccacaacttttatccctacgcagagcaacaacctaatataggattgctcacaaaccaatagtgcttgctacgcctcctgcaccaagctacacgttccccttcgtataaaaagcaacacccgccgaccgcagtgcagtcggcgggtgccggtagggaatggggctaatggcttgccttagagtccaggccagtagctgagcgtagcaggcgtagcgggggattctgcctcgaactgctgctcgatgtcatcggggaagttgtggaagagatccatcccgagcttggtctccagctcgtcgatagagagcgcgacgctacgaatggcggtcttcgctgcatagaagcggtgctcgaccaagaagccgatgccgtggtaggtagagcccttcttcagtacgagggccatccagtagtacttaggcacgacgatgacgccacggaccttcttgctctcgacctgatcatcacggatcgtcccgcccttggcgacgtagaggacgtcacggagctgggagttacgaccccatgcctgtaccttctgctcgaggtctgaccagaacttctggttgaggtcaccgagctgaggactcatattcgtgtagtagaaggtctgtctattcgcctcggcactgaacaggcggtcagaggaagctaccatatgaccacggtcgtatccactccctcggaagaggttctctgtggagaactgcttggggacatagggatcccattgccaggcatcgctacgcttgaccgcttgggctgagttcgtgttgtcgaaggtgaagcagacgaagcgtgggtgacgcttgtcggtgtcgtactcgagggagtagttcacgataccaccagcgcggtgcgtgacgaagtagttctgactaccaccatggagtgcgggtacctcgagcatcgtcgcatcaccgagtatgtactcacccgtaggggagggtgtgggcgaaggtgtcggagtctcctcacccgtaccctgctggctgatgatgagggtgtcacgaacgcccgccgaggtggcgatgatctgtgctgagcgagaggcgccgagattctgacttaccgagacggagatagaggtgctggacgtgccatcccccttgctacgctcgagctcgatccatgaggacgcatcctcgggcgtgacggtgagcttccagtcggaggccgcacggagcttgatgtagaagttcgagccttccttgggtacgctcttgatcttgtcggtcgaagagcctgggagggagagctggaggcggtcggaggtgcggacggggtggtcaccacgctcggtggtacagctggagaaagccatccccatgaggccgagccccatgaggatggtctttatccgaagagatttaatcgtcttctgcatagagaggaaggactatcgcttaccgaggtaagacttgatggtagcttcctgattctccttcgtgatggcgacgcgctcccactggtccgcggagaaggtcgcagaaggagccttgacggatgcgatacggtggaggacgatgtcggcaccagcgaacttcttgtcgctgtcgatccaagccgtctccataccattaccgatctggtcgatggtcgccgtgcccttcagcagagccacggggtcattgccattgaagctgaagtctgcgaccgtgccttcggtatagactttcgcctgctcgtggcgcaggacgagagaagcaccagctgcgagcttacccgtgagagcgatgcggctctcagcatactctccagttgcaggcttattcttagtcccaaagttcttcacgaggagcgtgtaagcactgaggtcaatctcttgatccgtggggttggagatctggatgtacttctcgaagtcgaagccttcgatgtaggcggagatgatcagatcgccagaggtagctggaggggtaggtgtgggcgtaggagtgggcgtaggagtaggagtaggagtaggagtaggagtgggatcgggcgaaggggtaggcgtaggagccgtgccctccgtgcagcgctcagccgtcagaccagcgaggtcatcagccgtacgaggccagaggttgtagtgcttggtgctctgaccagagttcttgtttgtcgtcaccgagcgctggatgataccgacgatgcggccgttcttgtcggatgcgatcgtcgtcttgaaggtcgagtagtaggagatagctaccgagagatcggatacaccagccgtgacctgcgtagcgcagtccgtgagcgcattgaagtagctccctgcagaggtcttgccctgagcaggcttgttggggttgagctccttgccaggagtcttgaactgagcgccatcgacagctacgaggatgttgtcgtacttgccagcatagatgtctgcgaaggtgacggccttaggagtaatcgtcgctacttcgcctgtgggagtcaccatagaggcagcatcattcagacccgtatagtcgatctgcagtgagccatcctggtagcgaccgaccttcgtgcccttagtcttgatggtgaagacggcaccgggacgccagtccttagaggcgttggcattcagacgaagcgtgatgccgacttcgccagcctgcacgacgatgttcttgaggctggtcatattgttcgccgtgatgtcggagaggaggacggccttgaaggtcgtctcttcgtctaccgtgacgctctgacccttgtcgtacttcgcgatgaaggcggcgagtgctgcgccgtctactgtagtggggttcgagggcaggttaggagtaggctgatccttacctggggtgatgactgcagagccgtcgccagcctgcgtgatggtatagtagagggtctcgttgccagccttgaaggcgaattggccttggcgggtagcacccgaggcgttcttgaggatcttgatcgtgacgtcacgttcgccagcgtcccctgactcggggctgatgctcagccagtcgagggcggtggtagccgtccaagagcggttggtgcggatgtgcagcgtggcggtgctctcgtccttgccgatgagggtattgccgttgctgtccttcgtcagctgggtgaccgagatcgatgggcgctcgtaggcgtcatcgttgtccttacacgaggcgagggacagggtagcacaggaggctaagaggagcgtccagcgcgtgatcttacttgttgtcatcagtcaatcgtatttgttgagatggtgagtgctgtaggggagtgattagaagcgtgcgcccgtgagctggacatcttgctcacgcaggatgaggagctgaggggtgtcacggaagtaggtgaggatagcagtgatcgtacccgagcccgaggggacggtgcgaccagcgaacttcgcatagctgctcgtgcggacgatgagctgtgcgccagagcggtctacgagcgtgcggttcacattgcggttcttgtccttgccctgtggatctgcataggtctgacccagctcggaggcgaggaactgtacatccttgagactgacaagcgtacctgcgtacttcttattcagcgtcgcgatggtgagctcgtggggcttgatatcggtgtgaccttccttgaggaggacgcggtgcacgaggagctctgggtagaaggctgtctcatacttctcatccttggaggtatatccgatattgatctgtccagcgtagtcgccgagctgcagaccctggcagagaaggcgtacacgcgtaccctgggggtagacagagctgaggttgccgagggcgaacttaagctccataccgcccgtctcatcctcgatgtagcaggacttgtagaggttcccctcgctgtcgtccgaggcgatgaccgcagagatgacgatgggcttgtcgatgagcgtaccaccacgcttgtagagtgccttgagctggctaatggtgtgtgtgggcagagggagctcgtccgtactcttctggtcggtacggggaggatcgacttcgttgtacttcgtgcagctcgtagcccctatcccgatgagcatcgagagggtgagtgcatatatagcgtgacgattcataggatctatgcgtgtagggagttagaactggagggtggtattgaagaagaacgtcgtcccgtagacataagagagcttcgtatcgaaggggcgatagagctgctgcgttccatcggtagcacggattgtgcggatacggagctgttcgtagccgccattgggcagactgcggttgttcagcacgttgcttaccgagaggttgaagcgcaggtacgtgccataggtgatgcgccaggagtagctcgcgaagaggtctaccgtgaagccatcacgcagctgctcggggagaatatagttgtagtcaagcgaggtgcgcccgcggtcggtgcggatgacaggcgacatcgagacgaagttgcgcccgaagtagttcgcgttgatcccgaagtttgcgtaccaaggagagtagtacgtcagcccgagggtagcagccgtctgaggcgtaccgctcacgttcagccccttccagttgatgcggtcacggtcgacgatctcgttggagttatcgatgctctggatgtagctggggttgttggcatactgatactggccgagggcaagtgcagcgttggccgtcagcgtggggctgatcttcacttcgaagccagcttctgccccgaggtggcgggtggcgatgccggtgatgatgtagttcgagaacgaagctcggctatcatcatagaagctcatcgagcgggtgtgatctgcgatgtgcgtgtagaaggccgtcacacgtccgcgcagccagggaaggcgtacgaggtaggaggcttctgccgagaagatcttctcgctcttgggatcctcgatatagctatcgcgtgtacgaggcgagatgaagagattctggaaggtgggtgcctgctcgaggtatgctacgttcgactgcaggtagtggtgcccattgagcttgtaggtagccccagccttcaccccgaggtcgttgaacttcacgcggtccgacagcccataggagttgtcggggaagagcccgcgcttctgatgaccttcgcgctgcatccccgtgtgggtataggagatacccgtataggcatcgaggcgcgtgaggtggtaggtcgcattggcccacatctgatagcggtagctctgcgcggtgtagtcgtagctgaagcggtcgcccttctggacgatgcggtcggggtgcaggaggtctacctgactcttcgtcgcgtcgccaccgaagtcacgctcagcgaacttatcgatgtcatagacgaagtccgcaccgaggaggtcacctacctcggcatagttcgccgtgcggttgtggcggaagttcgctccacccgtgatttcaagccagctcttggggagccagttggcagaggtcgcccaagcgaattcacgctggtcagtgtggcggtcttcgatcatatagagtgccttacgccccgtagcgagggtacggccagaggcatccttcaccgtagtgaggttcccgcggttcacctcatagaggcggtcccaattgatatagcggacgttgggatcagacttccacagctcctcatagatcgctgcagcatcgccatcctgactgttggggtcagccatacgcgtgaagtaggaggggaggtagcggtagtagtccgcacgtgggtcgggagcgttgtaccagttcagcgatgaataggcattcttcccgaagcggtagctgaaggtggtgttgatattgagcgtcttctccagattgctgaagtagtgcgagagctggacgataggctcgtggttgcggcgctcacgagcattgcgccacttaccgccctgacgcccgatgttgggattgtagaagttcgagccgacgaggtcatatacctcctgagtggtagcgctggctacaccacggcgcgtaggagcaccgagggcgatgaggctaaggctattcatctcgtcgagcttcttctctacgccgaggaagtagctccaggcatcgtagtactgcccacggacgtaggagtactgcccattgccgatacggcgggcgacgctggcagcgaagctccagccgtccttgcgctctcccgaggcataggtataggcgaagcggttgctataggtgcggttgctattcgagtaggtgaggcgatgctgcgcgccaaacattgaggggcgtgtcgtcacgttgttagtcacgccgacggcaccaaagcccgagacgatgggctcgaaggactgcgaggtctcctgctggcgggtgacgtcgttgagaccgccccagagcgaccaagctgagtagccgctgttgaggtcgttcatcccgatgccgttgagcatctgctcattgtactgggagtcgtagccacggttgcggaagcgagccgtgctgaagacgtagcccgaagcgctgaggaaggggtcgcgtgaggaggtgagtagggtgacgcggtcttgcatgccggcggcttcgttgccgtcctcttcgctgacgatgaggtcatcgtagcgaccattcccgccttcacggagtgcgacgagcttgagttgcttgaggcccgaagcttcgttctcctgcttgaccagctcgatctgcttggtctcgtagccttcagcggagaaggtcagtgtatatcgtcccttggggaggagcgccaggacacttcgggcgtcttgcccgaggagcatcttcttcgccacggggccgtagatgctgacgtggaccttagcgacgggcttgccgctctggctgtcgatgaccagaggttcgcccgtagtctgtccgaggcctacacttgcgaatgtcaaggtgcaggcgagtacggtaataagtttattcatgcggtcgcattatatcgatgacgcttgcatgcactccgcggatcgtacagacctcccgctccgtcttcggaactcctgtcattatgaggtgtaagccgtttatccgtgctggagcttcctccctatcttcgaagctgagatacgaagtagcgcgcaagatttgttacatttgcacgactaaattacataatctatctcggatagcctcttaaacgacaagcttatgctaaggaaaatctccgctctcaccctcgtccttctcctcgcgctttgctccctccaagctcagaagcaggtgcgcctcacggtagccttctacaatctggagaacctcttcgacaccatcgacggggagaacaacgatgccgacttcctgcccgatgggaagaaccagtggacgcccgacaagtacaagcagaagcttcacaacatggcctacgctatcagccagatcggctcgaagcgaggacctgatatcctcggggtctgtgagatcgagaatagaggcgtactcgaagacctcctgaaggaacccgagctggcgaactccggctacgagatcgtgcactttgactctcccgacaagcgcggtatcgactgcgcactcttctatcgtcccagctactatcagttcaccgctgcacacccacaccccgttatcctcaagggggaggagcatatcaagacgcgtgacgtcctcgaggtcaatggcctcttgcttggcgaacccgtatcgttcctcgtggctcactggccttcgcgcgtcggtggcgagcaggtctcactcaagcgtcgtctgtacgcagccgaagtcatgcgctcggtcacggactccctcctcgcggcagaccctaataataaggtcatcctcatgggggacttcaacgacgaccccacctctcccagcgtcgtcaacggcttgcgctcgaagacttcgacagaagatctggcacctaccgacctcttcaaccccatggctgccctttactcttcgggtcgtggcacgctcgcttatcgtgacgtgtggaatctctttgacaacctcgttgtcacgcccaacctcatcggcgggcccgctgatcgcctgcacctccagcaggacaaggctacggggaactacggctatatcttcaatgcggacttcctcacgcagaagacggggcacttcaagggctatcccttccgcaccttctcctcgggtcgcttccaggggggctatagtgatcactatcccgtctacctctatctgacgaagaccatcgccgaatagccccgcggcttactccgcaagcttaagcgaaaagaagtcccgcgcccacctctgtatgctgaggtgggcgcgggacttttataccgtctgggggctgtctttttagtgctgtgggaagtgcttatctatgaagggatataagggggagcgcgggatggaaaatgaaccagtactgctcaccagcgcgaccagtactggttgccctatgtgaccagtactacttcgaagtcggaccagtactggttggatcggtgagcagtactggttcgtttttagcgggtggcgacggcggcgacgaagacgtggacttcgctgacgccacactgctccaagagatcggtgagcgcaaggagtgtggagcccgtcgtcaccagatcatcgacgagtaggatacgcttgccccgtagctcctgaaggcgctccgtcttgtcagtgagatagaaggccgcttgagcattctcacggcgtgcgtctcggtccagcgccgtctgtgagtgactgccccgatggcgtaggaggtagccttccgagcaggggacgccgtagtgccgtgcgagggcttcgccgaggagggcggcttgattgtagccacgggcttcgaggcgcgtaccttcgatcgggacggggaggatgaggtcgatgtcgcctggctggggtacaagttgcccttcggtgatggcggtgcgcacgacaaagtccgcgacctcaccatagcctcggtacttgagggcgatgatgaggtcgtaggtgggattggcatgctggtagatgaagggggcggagaggcttcggatcaggggcgagccaagaagacgctcctctgcatgcacgaaggtgggggcatggcgggggagcttcgtggcgcactccatgcagacgcagtgctcccgctccccgagacgcacccgacagatggcgcaggtgcgggggaagatgaggtcggtaaggaaagcgccgatgcgcttagtcgtcgcccagctcatcggagaggagttcgctgatcgcctcgcgcacatcctcatagggatagccccgatagagggcgaagcgagtgagacggtcatagatcttgcgtggctcaagcccagcggggagggagcggtacttacgctccaagagggcggtgagttggtcttcgctctgcatctcttcctcctcaagctcctcgatagcggcgtcgatgaggcgcgaagggatgcgatgacggcggagctcggcctgcaggcgaagcggcccccagccgttaaagcggtacttatctcgcacgaaggctcgggcaaagcgctcctcgttcaggtagccctcttgctccaagcgctcgatgagggcatcgcatacctcgtcggagatctcccagcctcgacacttcttgcgcacctcttgggcggaatgctcagcgtaggcgcagtaggaggcgaggcgtgagaaggcttcttcgggagtaagctcctttttcttcttctggatcattaggcggggcaataggtgaggtgaaggaagcgaaccttcccactcaggtcgtggatgagcttggtcttggcgtgctgcctcccgatacgctcgagcatcgtttcctctgtcgccgtagcgtagagcggatttagctcgacccacagattccctcccgagcggagatagccttgagctaccagctctgccaaggcaatatagtaggcgatgggggaggcttcgggagcgaagagggctaagtgcggctcgtgaagcaggacctgaggtgtcatctcttcggcttcctcggggtggatgtagggcggattacttacgatgagatcgagtggaggcgtcgggggtgtctgttcctcaaggagcgcaaagaggtcgtgcttccacagatagacttcgcgacccgtggccttgcgcagagcttcgaagttggcttcggcgatcggtgcagcttcgctggatacttcgagcgctacgctttgcctcacctcgggaagggcggctgtgagggcataggcgatacagccactccccgtaccgacgtcgagcaagcgctgcgaagctcggctctcggggtgctgtaagatcagctcgaccagctcctccgtctcagggcgtgggatgagtaccccaagggcgaccatgaggcgatgccccgcgaagtaagtatagcctaatacatattgtaggggagtaccagcggagaggtcgtgtagcatgcgatccagacgggcgcactctgcgggtgataaaagcgtatctttgctcaagagcagtagctgcgtgcgggtacagcctcgtacctcctcgaggagttggcgggctatctcccgtgcttccgagggctcgtagagcgccgtgagacactccagagcctcctgctcgaatgatcgtatcgtatccatataagcaaatataacgaatacagatgacagatgatgagcgctatatgtgccgtgcacttgatctggcggcccttggaacgggctatacttctcccaatcccgtcgtcggtgccgtcgtcgtgcactcgggtcgtatcatcggtgagggctatcaccaccgcagtgggcagccccatgctgaggtgatggctatccgctcggtgagggagcgtaacctgctccccgagtcaacgatctacgtgacgctggagccctgctcgcactacgggaagacacctccctgtgcagatctcatcctacaagagcgcatcccacgcgttgtcgtcgccatccctgaccccttccctcgtgtggcgggtagcggactggagcgcctccgtcaggcgggagtagaggtcactgtaggagtcctcgctgacgaagcccttcgcctcaatgcccccttcatcacagcgcatacccagcaccgcccgctggtgacgctgaagtgggcgcagagcctcgatggcttcatcgatcgatctcgggagaatagcacagaggctcccgtcctcttcagtacgcccctgcgccagcgggagatccatcgcgagcgtatgcaccacgatgctatactcgtcggctaccggacggctctacttgatgatccgcagctgacgaatcgcctctggtatggctcgtcgcccatccgtgtggtcttagatccgcagctgtctttgcctccgaagcttcgcctcttcactgacggcctcgccccgacgtgggtgatttacctcgagggggcgggtgtgcctcagcctcgtgagggtgtgcgctatctgccccttagcggagagcgtatcgagccgcagcaactgcttcagctcctatatagagagggaattctctcgcttctcatcgaagggggagccgctacgctgtcatccttccttagcttaggcctctatgatcgcctcttagtggaggttgcctcgaagaccttaggtgaaggagtcccagcgcctgctatcccgaccgccctttagtcgcttgctcttataaaggccgtcccccaagcaaccggagttgcttgggggacggcttcttttagatcgagtagctacccgagcagcggactaatagttgtgtccgtctgggtcaagcatttccttgcgcgtgatcttatgcaggtcgagcgcacgccaagcgtagacgatgtacgctaagacgaagggaatgattagcgatacgaaactcattgtcttcagagtgaaggggctcgaggagctattgcggatattcagcgagtggttgatcagctcgggcatatctgcgctgtaggcagggtagtaggaggtattgttccacccagcgatgaggaagagggcgagtgccgtgaggacgacaccgataccttcgaaccagatccccttgcggaagccttccttgaggagcgtcagcaggatacctgccagtacgagcaccaccccgatgaagaagatcgcaaagactgcgggcatctcgatgaggttcttccagtacttgtagtccacgagataggtgacctcggggttagcaggatcgtaagcgaagccctgcttcgtgagaaggaagaagaggtaggcgaggaagaggatgaggaagatagcggcgttccaagcgagtgcaccacgtgagcgcttgtagattgtctcatcatcgatgttgttgatgaagaagaggagcgccgtggtacgtgcgaggaagaagacggcaaggccgaagacgacattccagatgttgagcactgcttcgaggccgtggagctggatacccttgtaggggagccactcggagatgacctggctggcaccggagagatcagcgatagcctcgcggttcaccgtgaaggtagagcccgtgaagaaggtcgatacagcggcaccgaggaggatcggagcgaggaggccgttgatgaagaggaacgtctggtaggtgcggctaccgagcacattaccattcttattctgatactcgtaggagactgcctggatgatgaagcagaagaggatgagcatccacacccagtaggcaccgccgaagctggtcgagtagaagagggggaaggaggcgaagaagccaccgccgaagacgaccagcgtagtgaaggtgaattcccacttacggccgatagagttcacgaggagcttgcggtcgagctgctccttgccaatgctaaagaagagtgactggcccccctgcacgaagagcaggaagacgaggagagcaccgaggacggagactaagagccaccagtattcttggaagaatgcgtagtccataataaatcgtttgcttagcttgattagatgacttcgtggggcttagtgctgatcagggccctgcttgatagccttgcgcatgatgttgatctcagccacgagcatgatcgtgaagagcaggaagaagagtgcgaaggtgatcatcaccgacgaagcttcgatcttagagatagctgcatggacgggcagaaggttctggatagtccagggctgacgacccacttcggccactacccagccggcttcactggctacccatgccagaggagtgaggatgatacttgcccagaggagccagcgagtagaggcgagcttctcattacgcttgtaggcgtaccacgtcaggatgaggaagagtaggaggaaggcaccaccgagcccgaccatgacacggaaggagtagtaggtcagcgggatgttggggaccgtctcatacttgctggtgaagtagccatagccgtagtaggggaagttctccatcagtacagtgcggtgctgctcagcggagatgctatccccagccttgcgagcggcacggaaggcattgagagcatcgatagcgatacgaccacgacgcatcttttcctccgtagagatggcgatcttaccatcgggctgacggtagccaccttcgaggatgttgatcacgccaggtacgtagtgcgtgcccgtgccagcgaccatgtaagagaggaggcggggggcttcgatgttgaagatgtgtgagggcttgccgtcgtcgggaagctgcttgtcggggttgagcaggccgatgacgccgaggccgatacccttgccatcctctgtgcagccttcgccggtgcacttacccgtgtcgtagatagcttccatagcagcgagcttcataggctggttggtagcgacgtcgacagccgagctgtgacccgtcatagccgtcagcagtgctgctacgaagccgaagggagcgatgatcttgaggttgcggcgagcgaactctacgttgcgcttgcgcaggagatagagagcacagataccgagtgcgaagaacgtaccgagcgtccaagacgaggtgaccgtatggaggaacttgatgatagccgtgggtgagagtgctacagcccagaagtcgctcatctcgttgcgcatcgtctcggggttgaagaccataccctgaggattctgcatccaagcgttagcgacgaggatccatactgcagagatcgtagctccgatgatggtgagccagctggaggctaagtggaagcccttgctgaccttcccccaaccgaagaacatcacggcgataaacgtcgactccataaagaaggcgaggatcccttcgatagcaaggggggcaccgaagatgtcaccgacgaaccagctgtagttcgaccagttggtcccgaactgaaactcgaggatgatccccgtagctacgccgatagcgaagttaatcccgaagagcttctgccagaacttcgtggacttcttccagaattcatcaccgctgcgatagtacttcgtctcagccagtgacatgatgacccccaggccgagggtcagcgggacgaagagccagtgatacatagccgtcagggcgaattgcgcccgcgaccatgagactaaagattctagatccattgtaaatagttattagagtttgatatgtttatctcgtatgaagaggtggggcgtcatcgggcgacggtatcgcctggcgcacggcgattgaggagctcgtcaccgacgaactcagatcgctcgatatgctgctccttggcctgctgcttgacgtggttggggaagaagaaggcgcgcaggatagcaaacataatgaagagcttcagcgcaatgatgagccaaagcttcttacttgtcggggtcaatcctcggaagccatcgcgatagaggcggaaggctcgcacgaagaaattgggttttggggactcagtcggcatagggtcgatgagagggtgagaatgataatttcatcggatggatccggttcggacaaagatagagcaaacgagtgagtggactactacccgagaggcccaataaccctgataatgagcccttagtttgatagcctacatctatgtgggtatttatgaaattaatatatcggggtactggagcgaaataaactacctactggacggtgtctaagggaggaataaagtgcctggatttatttgtcggaagctactggacttatacgatttgatagtatgtgcctttgggataaatggcatcttcttcgaagaaaatagcccctacgcaaatcattgatttacgcaggggcttcctgtaagtggctgtacccagagtgggactcgaacccacacaacctattggtcaagggattttaagtccctcgtgtctaccattccaccatctgggcgaccatataacgcacaccataggcgtacgcattcggctgcaaaagtaacgcaaaatcggtagataagcaatcgcagagcgcatagcgagtagcctccgtcgtgaagcggatgctgagatgagggtgcggaagggatgaggagtaaggactccatggtattcggatgggactacgggtagtgatacctcgcatagacctttaagtagtatgcatgactgctcttgctctcagctctttcggtagagtagacgtacagggcaagcaagatattggggccggcgacggtcaaagctgatgtcacatatctccgaggggagttgtgacgagccttagaccgagccgtgcacctaacatggtcggcgtatggatcgaggtggtgcagccagcgaggtatccctggctggccctatggggggcaggggcggttttggataggttggaggaacatgaagaaagacccctgcgagtaccagacccatagagatcccagacagagtagagccttgtcctacttgtcacaagcgggcttgtgtacgacccgataggggcacacagctgcaggatgttcaaaagattatcgggggatattctgatgaggtgaccttctctccggcttcgtccttgcgggcgaagtgatacgcacgacacatttcaatatctggaagccactgcgcgtctcggagagcggggcagaaagacttccttcactaccagcgctgacgggcggtccgtcgggtggggtaggagaaggtgcacacatcggagagagctaccatcaggaggagcgtctcatggcaatgtcttcccaatcttattcccgagattgacacattggatctcatgagcaggtctcctggcttatcaccctaacttctcattcctacgatccttcccaagtagcttcgtactcagtggcgaaggtctgccaagacgctcggcgaagagctcgttggtccttccgtcgtaggaggagcctatccatcatccccgtggggagttgcagatagggagtgacttacagtagcgggtactgcgccggattcacaccggcttcccttactaccctgggtccagactggtgcgcttcaccagcataatgccctcgggtatactcgtaagacacagcaaagttaagacaaatatttaaataacctaagggcttcaaggggagagtttgcgtggtgagctcaggcgcttctttatggatgaagatatgcctttgtaggggactttgagtgagatgattacgagggtgaaaaatgaaccagtactggtcgctgtgttgaccagtactgctcgcgtgatggatcagtactggtcagtatgtgctaccagtactggttgccttcgtgaccagtactgcttcacttagccatgctgctaagcctatacctatttattatatatagaggacgtccgtcgccctcccgctgtagtgagcgtggagggcgacggacgtcgtggaaaatgcgccttggatagcgctatggcaggatcggacagacagagtcgacgataccgtcggcaagtcccttcgtggggacgatgatctccgtcgcttcggtgatcgaggcgactaagaggaagatgtctgccgcagggacgatgacctcagcacggtcgggcttgaggcggaagagctgcatacgctgctcgggggtgtactgccggagctcgtcggcgacacgctggaggctctcgacagggaggctgtttacgttggcgcgctccgaaggggcgccgaggcgaaggagcttattgatattcccccctgtaccgacaaggcgtagggtgccataggtagagcgcagggtacgcacgtagtcaccgaaggagttgcgctcttcgtcacgcaccttgccgctgagctggcggatcgtaccgatatcaaaggagcgagactcgatgagctctgcaccacgtacgaggttgagctccgtactccccccaccgacgtcgacgtagaggaaggtatcatcggtctgggtggccagcgaacggatgaggtcggcagagatcaggcgagcttcctctctaccatcgatgatctcgatacggatgtcggtcttctcgtagatcttctccacgagctcggcgccattctcggcatcacgcatagcagaggtggcgcaggcacggaaggcagagacttcgtagatctccatcagctcgcggtaggccttcatgaggctgacgagctgcttacccttcttcttcgatatgcgcccatcgacgaaggcatcttcaccgaggcgtagggggacgcgtaccagctggaccttggagagtggctcggcactcccaggctcgttgaggcacttgatgagtaggcggacggcattggagccaatgtcgataccggcgtagtgagacttacccattattctctttgttcttctttgcttcgtagtacttgtatagtgcttgctgggagttgaagggggcttcatcgggacccaagtcatcgcgacgtgggcgcacggcttccccttggacgtagtagccctgctcggtatctcttaggccagctgagatgatgaagtccagctcacgctgtatggcagggtcgtagacgggagtcatgacttcgatgcggcggtcgaggttgcgcgtcatccagtcggtcgagccgatgtagtacttcggctctccacctccaccgaagacgtagatgcgggagtgctcaaggtagcgtgagatgatcgcattgatgaagagcccttcgctatagcctggtacaccaggtaggagggagcagttgcctcttaggcagagctcgacacgcacaccagccgtcacggcttcgtagagcttggcgaccatcttctcatcgacgatatgattgagcttgaggcgtatgtaggcctcctgtccagctcgagccaagcggatctccttattaataaggttgtagagtggctggcgcatatcgttgggtgcgaccagcaggtgatggaagtgcggggcgatgaaggggcgctcgatgaagtcaaagacctgcatcacgtcatgcacgatgcccttgtgcgcggtcatcagcatgaggtcggtatagagtcgagctgtaccctcgtggaggttacccgagccgatgcaggcgatgcccccatgcttggtgcggatgtagacgagctttgagtggaccttcagcttttcatgaccgaggacaacgttgataccgaagtcctgcatcttctttccccagttgatattcgactgctcgtcgaagcgtgctaagagctcgacgacggcggtgacgcgcttgccgttctgcgctgctgtggtcagcgccttgacgaccttggagttctgcgccacgcgatagagggagatacgtatctcggtgacctcttcgctgatcgcagcttcttgtagaaggcggaggaagtgatcgaagctgtaataggggaagtgcaggcagcggtcttggtgcatgatctggtggatcatgctctgcgtgtagtggaactcattcatctgcagcgggggctgcttgggaaagcgaagtcccttgcgcccgcagtcagggagatccatcaggtcacgcatgttgtggtagcgtcctccgccgatacgtgtgtcgcggaagttgagctccgccatagcgctgagcttacgcaggatctcgggggagagggcttggtcgtagacgacgcgcacggtctcgccgcgcttacggcgcttgacaccacgggagaccttctcgatgacacttgagcggaggtcttgctcgatctcgaactcggcgtccttggtgaacttaaacgtataggcctcgtactgcacgtactcccgcccgatgaagatgtaggggaggcagtagcggatgacgtcgtcaaggaacatcaggtagctctcaccaccctcgtcacgcagacggaagaagcgcccaagctcgcgcacgggcacctccagtagcgccacctcgtgccccgtctcaggctcctcctgatcgtgccataggacgactgccagatagagcgactccttgaggtgctgctcggggttgaaggtcgggctattgatgaagatcgggttggtgaagccgttgatcttctccatgaagaaggataagacttcctcctcttggctgctggtgagctcgcgctcattgatgatgtggatgtgagcagccttgagctcgcgtaccagctgagcgaaggtctcgtcgaagagctgggagtactctctattgagtcggaggatggtgcggagggtctcctttgctttcttgcgctcggtcgtggggagctcttccgcagagtcgatgaggcgacgcagtgaggcgacgcgcacacggaagaattcatccaggttgttggagtagataccgaggtagttgaagcgctccaggagggggagatcggggcgcatggcctctaagaggatgcgcttattgaagtacatccagcttgtgtcacgctcgatatagggcataggcccgcggtgctgacgttgctgcatagagtctgttaagggggaggatatatgggctaaagggcgctaccgtcgaagccgaagggcagtaggtagcggcagtcctcgaggaggatggtcttctcctcacccatcagaagtatggggaaggggtggaagcgtgtagcggtctccatgatcacctgacggcagctaccgcagggggagatgaagggtacacgaccagcactgttgatagcgacgatagcgaggcgctcgacagcgacgtcgggccactgggcaccagcccagaagagtgctgtacgctcggcacaagtccccgaggggtaggcggcattctcttggttggagcccgtgacgatctcgccgttagcgagtaggacggcagcgccgacgtggaagcggctgtagggggcgtaggctttgcgagcgacttcgagtgcacgctcctccagctggcggtcttgttcggagagctcggagcggtcgagcgtcttatagggaatagtaaatgtttgctccatgtgcgtatgctatacggatgtgatgagggtggggagactccccagcacctctatagcgaatgtacgaaaaagtgaggaatgcttgccgtagaggttgcaggtgaagttcctcagataaagcccttacttgggggagtcttggggcatagccgtaagcgccttgcggatcttggcggtgaactcgtggttcttccagccccagcgtggggctaagagtagggccggcggtgactgcgagacgaagcgctccagcacaatgtcggggcggaggcgatgcacgaagtccacgataaggtcgatatactcctcctcggtgaagagatggaagtccgatggatcacgctgatactcgcctgccatgatcgtcccgcggatgatctgtagctggtggatcttgagcgtagtgatggggagctgtgagaggcggtcggcatgctggagcatctcttcgcgactctcacctgggagaccgaggatgaggtgagctccgacaaggatgcctgcagcgtgggtacgctcaatggtctcgacgctggtctgatagctgtgcccacgctggatacgctcaaggctgcggtcgcacgtgctctctacaccgtactctacgaggaggaaggtgcgcttcgagagctcctcgaggtagtcgaggaggggctggggcatgcagtcagggcgcgtgccgatgatgagcccgacgacgtcttcatgacggagtgcctcctcgtacttcgcgatgcagtcctctacctccccgtaggtattggtgtaggactggaagtaagcgaggtacttcatctcggggtacttccggcggaagaaggcgatcccttcgttgatctgctcggtgatgctcttgagcttcgtagcgtagttcgggctgaagctcttattgttgcagtaggtacagcctcccttgcccatagatccgtcacgggtggggcaggagaagcccgccgtgagcgtgatcttctgcaccttctgcctagggaagtggcgctggaggaaggtggcgaagtctacgtaggggagagtagggcttgcggatgacgtcatacggtcggagtcttggcgcgccctatcggcgaatggatccagtcggcatgctcgaagtgctcagcacgctgcgtgcggatgtattcctctaccgaggcgttgaatgcaagtgggaagagccccgtatgctcctcgcggagggcggcaaggatgtcctcctgcaggtcggtgatgctatagccttcggggagtgctggacggaggttcgtgacctgtgagcgcactgaggcgacacgtgagcgtgcctctacctcgggagagactgtcaggatacgctccagctcctcgaggttggcatcgaagagcaggcagatgtggtaaagcatgcgtgagcggttcaccgcctcagctgctccaccgaccttatagccatcaagacggaggtcgccacggggcgagcgctccacgacgacaccacgcccagcgagtgctcgctgtatgggtgtagggaaggccttcaggtcgaagccttgacccgaatggtcgttctttatcgccgtgaagttgagattcccgaggtcgtggtagactgtgcccccgcccgatgtgcggcgcaggagggcgatgtcgtgctcctcgaggtagtcgagatcgagctccgcctcagcccactgatagcgccccatgaatacggaggggcgattcacccacagcatgtagatggtgtccagcgggcgaagctggcggtagaggtagtcctcgagagcaatgttgtagtacgggtcggtcgagggactgatatagtagtaggcgttggaggtggcgggagtcgtcatcgtcatcatagtcgaaggctatccctccagcggcatccgagccgtcggagggatagccttctcttattataataggtataaggggcgctggactaagcgtcgatgcgagcgtaggtcgcattcgcctcgatgaactcgcggcggggggctacgtcgtcacccatgagcatggagaagatcgcatcagcctcagcggcattctcgatggtgatcttgcgcagggtgcggttctcgggattcatcgtcgtttcccagagctgctcttcattcatctcaccgagacccttgtagcgctgtacgcgtacgcggttctcatcgccaccaccgacgcggtcgatgaaggcctgacgctgctgctcggtccagcagtactcacgctccttgcctcgggtacagaggtagagaggaggcgtagcgatgtacacgtagccgttctcgatgagcgagcgcatattgcggaagaagaaggtcaggatgagcgtggcgatatggctaccgtccacgtcagcatcggtcatgatgatgaccttgtgatagcggagcttcgagagattcagcgccatgctgtcctcttcggtgccgatggtcacgccgagagccgtgtagatgttgcggatctcttcgctctcgagcaccttatgctgcatcgccttctccacgttgaggatcttaccacgcagcgggaggatcgcctggaactcacggtcacggccctgcttagccgtaccacctgcagagtcaccctcgacgaggaagagctcagagaggatgggatccttagaggagcagtcggcgagcttaccaggcaggccaccacccgagaggggcgacttgcgctgtaccatctcacgcgccttgcgtgcagcttggcgagctgtagcagcgaggatgaccttgtctacgatgatcttcgcttccttggggtgctcttcgagatagatctcgagggcttcgctgacggcgacgtctacggcgcccatgacctcgttgttcccgagcttggtcttcgtctgcccttcgaactggggttctgcgaccttgatgctcacgacggctgtgagaccttcgcggaagtcatcccccgtgatctctaccttgaccttgtcgaggagcttcgagtcagtagcatatttcttcagcgtacgcgtcagaccacgacggaagcccgctaggtgcgtacccccttcgatggtgttgatgttgttgacgtagctgtacacattctcgttgtacgaggtgttgtaggtcatcgcgacctcgacagggataccctgcttctcggtgatgatgtggatgacatcctcgatgaggtgctccttggagcggtcgatgtacttgacaaactcctcaagccccttctctgagtagtaggtctcagtgagggctacaccagcttcgtcacgctggcgctcatcggtcagtgtgagggtgataccggcgttgaggaaggcgagctcacgcagacgcgtagccaagatcttgaactggtactctgtgcaggtgaagatcgtgtcgtcgggcttgaagagtaccgtcgtacccgtcttgtctgtcgtgccgatagtctgtagctcggtggtggggacaccacggctgaactcctgcgtgtagatctttccgtcgcggtggacggtagccttgaggagggtagagagagcattgacacaggagacaccgaccccgtgcagaccgcccgagaccttataggagcccttgtcaaacttaccccctgcgtgcaggaccgtcagtacgacctccagagcgctcttgccttccttctcgtggatgtctacggggataccgcgaccgttgtcctggacttcgatggagttgtcctcgtggatggtgaccttgatatcattgcagtagcctgccaaggcctcgtcgattgagttgtctacgacttcatacaccaagtggtgaagacccttctcgccgatgtcaccgatgtacatcgcagggcgcttacgtacggcctccagcccttctaagacttgaatgctactggccgagtattctttctcgttggtatggtcttgatcgaacagctcttcgctcattgcttatctgtgtgattagtccctgcggtgagcacacggcctcacggtagggtattacatattatatataggacaaagatacgaaaaaatgcgctccctcgggtgttatttcgccagtacttcgggtgggctattggggtatcttaatggcttctgcattgggacgaggtaatttcatctggatagcaaacctcgtcttccctcaagaaaagtggcccgaaagtagtggtaaacccacgaagcagtaatgcaatccttctatctacgtgcaaagtcctaaaatctacgtgcatagacgataagattttcgtgcctggattttaaatctacgtacgtggatttaagaataggaatactacatcgggagaatatctctttggttttgaggtaatactatcggtggtttgtcactttttgtgtactacttctacttcctacttggtagcctttggtgttgcctttttgagggcaggcgaggtgattctctcagtgcgggcattgtgctctgggtagatatgcaccaaagcagtatatttgcccatagcattccagccgcggcggaggactccacctctgtcgtcggatatctccccttggaacgacaatctaatgaacaagatctacgccgtgagtagcctcgcagctgctctaaccctcgccttgcccagcccagtgactggtcagcgactcctccccggctatcgctatgatcactcgaccgccccgacgggtaaggagtggcaaagcccagccgactatgctcttggtaaggagcaaccccacgcctacttcttctctttcgccccgaaggaccgtgctgagcgcgtactcccagagtatagctcgctctaccagagccttgacggaacgtggcgcttccactgggtacgtacgccagaagagcgccctgtggacttctatcgcgccgactacgatgcctcctcttgggatgaggccaccgtaccgatgaactggaatgtctacggcctccagcgcgacgggaagcagaagtatggtacgcctatctacgtcaatcagcccgtcatcttctaccacaaggtgcgccctgatgactggcgcgagggggttatgcgtaccccgccgaaggaatggacgacctatcgtgaccgcaatgaggtcagctcctaccgccgcaccttcaagctccccaccgagtggagcgacaaggcggtcttcctcaacttcgatggggtcgactcgttcttctacctctggatcaacggacgctatgtgggcttctctaagaactcccgcaatctcgcctccttcgatatctcaccttacctccgccccaagggagaggagaatgtcatcgctgtagaggtctaccgcaatagtgatggctcgttcctcgaagcacaggatatgttccgcctcccagggatcttccgttcggtctacctcaccgctaagccgaaggtgcacctgcgtgacctgcaggtcatccccgatgtgacctccgacctcaaggaggggagtctgcgtatcacctctgagctgagaagtcaaggaacgaaggctgtacgtcctgacctgcgcctcagctacaagctctatgcgctgcctctctactccgacgaggtgagcggtgctcccgtggctaccgccgaagggcgtagcacctcgatgggcacggcagagacgacgctcacgctccagagccctgcgctctggtctgcagaagctcctcaccgctatgtcttggtcgccgagctctatgacaaggcggggaagacgctgctggatcgtgcgtccatctatacgggcttccgtaaggtcgagatccgcgagacgccagccgaccaagatgagttcgggcacgctggtcgctatttctacgtcaatcataagcccgtgaagttcaaggggacgaaccgccacgagacggatccctcccgtgggcatgccatcacacatgagcagatggagcgcgagatcttcttgatgaagcgtgcgaacatcaaccacgtgcgcaactcccactatcctcctgctccctactggtactacctgtgcgataagtatggtatctacctcgaggacgaggcgaatatcgagtcgcatcagtactactacggcaaggcttcgctttcgcatgtgcctgagttcgaggcacagcacgtctctcgtatgctcgagatggtgcatgcgaatatcaaccaccccagcatcgtcatctggtcgctgggtaatgaggctggccctggtgtgaacttcgtcaagagctacgaggctacgaagcgcgtcgatacctcacgccccgtgcagtatgagcgcaataacgacatcgtcgatatgggctccaatcagtatccttctatcgcttgggtcgagggggctgctacgggtaagtataagatcaagtaccccttccatatctccgaatacgcccactctatggggaatgcctgtggtggtctggcggactactggacggctattgagagctcgaactacatctgcggtggtgctatctgggactgggtagaccaggcgctgtacaactacacgcccgaagggcttcgctatctggcctatgggggtaacttcggcgacttccccaatgatggtatgttcgtcatgaacggtattatgttcgccgacctccagcctaagcctcagtactatgaggtgaagaaggtctatcagcagatcggtattgaagctgaggatctgatggcagggcgtgtgcgcatcttcaataagcactacttcgtctccctcgcagacttcgacctccgctggagtctttatcgtgatggggtagaggagcgctcaggcgtccttgacctccccgctatcgctcctcgtacggctgagaccatcacactgccgttctctacttcagacctccagcctaatagtgagtacttcgtcaaggtcgagtgccgtctgcgcaccgacaagccttgggctaaggcaggctatgtggccgctgatgagcagctcgccctgcagtcgctccgtgagcgagatgccctgcaagggggtaagggcctccgtgcgaagagcctgacgaaggaggtctatgaggtcgctggtagcgacttctccgtgcagtatgacctccgcgaagggacgatccatcagctcgtctatgctggcgatacggttatcttcccaggcaatggcccccgtatcacggccttccgtgcccctgctgacaacgatatctgggtgcgctcggcttggactacgaatggtctgcacaacctcaagcaccgtgtcctgaagcagcaggtcactaagctccccgacggctcggtagagctcttcttcaccgtccgctcacaggctccctatggcgctacgctcacgatgcacaaggcttcgggtaagtatgagctcacggaggataaggcacatcccttcggtgagaatgactttgctatcacatcgcaggctatctggcgcgtgtatcccgacggaagcatccagcttcgctcgaacctgacgacgaataagccctcgctgcctctcggtcgtctgggttatgagttcgtcctgccccgtgcttacgacaactatacctactacggtcgtggccccatcaataactatggtgaccgcaaggcaagccagtatatcgagcagcacaagagcaaggtagccgagcagttcgtctccttccccaagcctcagacgatggctaaccgcgaggatgtacgctgggtgagcctgacgaatgcctctggacgtggtatgctcttcctcacggatagcgtgatgacgagctctgctcttccttactctgcgatgcagctgatgatggctcctcacccccacgaactgcctgctgctggtgacacccatctggtactctcccgtagcacgacgggtcttggtggtgccagctgtggtcagggtggccctctggtatccgctcagagcctcggtacgccacagctcttcagcctgatgatccgtccgctccgtgctggtgactcagccgtcaagcaggctaaggcgaagattgacggcccagtagctccctcgatcacgcgagatcctcatggtgacctcgtcatcacgggtgatcccggggaagccctctggtacaccgtcggtcgtggccgtcctcagcgctataccgagcctatcgacttctctcagggtggagaggtctctgcttgggcggaaggtcagcgtcgtctaatctcgactatgtccttcggtcgtatgaagtacgctgcctgccgcatcgtcttctgcagcagtgaggagtatggctatgaggcacaggatctccttgatgagagccccgacacgatatggcacaccgtatggacgctcaccgtacccaagcacccccactggattgacttcgatctgtacaaggtgaagacgatcagtggcctcacttatctgcctcgtcaggatgagagcactacgggtgatgtcaaggactatgccctctcggtgagtgatgacgggaagcagtggaccgaggtcctacgtggtaccttcggcagtgataagaagctcaaggaagcgcttctcaagaagcctgttcgtgctcgctatctgcgctttacggcgctctcagctcacgacgggcaggactacgcctctggctcagagatccatatcctggctgagtaatagcccatctctttataggacggtaggaaactgccgctccagatgcgacggctttcgagggagtcactcccctcgaaagccgtcctgcataaggctcctcgcgagggctaaccgtttgaatgtccccgcttttttattagttttgctttgaattgtcagttcactcattcatatacagacattacatgtatcgattagagcgctggatcgcattgctcggactcctactcttcgctgcacccgaaatcggggctcagacgaaggtgcgtcgctatgacgctaccaaggagacggactatggggtcgtctaccgcctgccccgcacagagatcgaagcggtggtgacggtacgtgagcgtacctataccccaggtccattgtcggcctatgctgataggtatctcaataagaaagcttcggatatcccccgccatacctttgagttggtttcggctcgcctctataccgtagggcgtcctgattcgacccagcagtatctggtctcctttgaccgcaagacgctggctcccttcgtcaagctcacagatgcaggtgtcctcttctccatcaatggaggcggtgagctgcctgccagcctcagtgaagagcgtcactctcgtgtcgtctcagagaagcaggtcgataccgctcagcccgccctctcccgtgagtattcgcaggctggctccaaggctaagcaggccgagatcgcatcgagctacctctatgacctgcgcgagaatctgatgaacatcgtcacgggctccgtagacaatatgcctaaggacggtgagtccatgcgtctggctctcgagcagctgcgccgtgaggagcagcgcacgcagcgtctcttcctcggggatacgaccgagcgcgtcagtgagtacatccttcgctacacccccacggggcatgaggagggtgagctgactctggcgcgcttctctccagtggcagggatgacggaggcggatgatctcagtggtgcaccgctacgcctcgtgatctccgtgcaggagcaagctccagagctcaacgaaaaggaccagcgcaagaaggataagatgctcgagcatagcatcgtctatgtgcagcctggtcaggcacgcatcacgctcctctatgagggacgcaagcttgccgacgagcaggtcagcctcgctcagctcggcacccttcaggctttagctcctaagatgctccagctgacccccaatgcagcgacggctatctacttcgacacacgcacgggagctattcttgatgtgcgtcaggagtagcggagctctgctgtacgaacctccaatcaagacggaaaatcgcaactaacaatactcatcctaacaccccaaacttatgttcaaaaatcatcctaagggattgatcgcagcctctctcgcaaacatgggagagcgcttcggcttctacatcatgatggcgatcctgacgctctttatctcggccaagttcggtctgagtgagcagacgacagggtacgtttactcggccttctacgcctcgatctacctgctggctctcgtcggtggcgtcatcgctgaccgctcgaagaagtacaaggctacgatcgtcgctggtctgatcatcatggctctcggctacgtgctgatcgctatccccacacctacgccagtacctaacctcgccctctacctcacgcttacttgcgtcggtctgggtgtcatcgctttcggtaatggtctcttcaaggggaacctgcaggtgctcatcggtcagatgtacgatgatccccgctatcagagcgctcgtgacgctggcttccagatcttctacatgttcatcaacatcggggggatcttcgcacccttcatggctgtaggtatccgtaactggtggctgggtcacaatggcttcgactatagcgctgagcttcccgctctctgtcatcagtacctgcgtgaaggtgctaacatgccagcacaggctatggagaaccttcagagccttgccaccaaggtatcgctgggtaatgaagtcaccgaccttcaggctttcgtcggtcagtaccttgatgtcttcaaccgcggcttccactacgccttcatcgcagctgtcgtgatgatctgcgtatcaatggtgatcttcctcattaaccagaagaagttccccgatccaagcaagaaggaagttgcaactaaggatggtgctccctcacagaacgaagtacagatgagtgccgctgaaatcaagcagcgtatctacgcgctcttcgcagtattcggtgtcgtcatcttcttctggatgtccttccaccagaatgggtactcgctcacatacttcgctcgtgactacgttgacctgagtgttatcaagattgacctcggcttcacggtgatcaagggtgctgagatcttccagtcggtgaatccgctgatcgtcgtctgcctcacgcctctcgtgatgtacgtcttcggtcgtctgcgcaatcagggtaaggaaccctctgctccccgcaagatcgctatcgggatgggtatcgcagctctggcttacgtcttcctgatggtttgctcactcggtctgcccgatcagagcacgctcggtagcatgacggaggctgcaaagcacgaaatgctcctcacgccttgggtcatggtcgggatgtacttcatcctcacgcttgctgagctcttcatctcgccccttggtctctccttcgtatcgaaggtagctcctccccacctccagggtgttatgcagggtgcttggctcgcagctacggctctcgggaactcgctcctcttcatcggtggtatcctctatacgagtgtgcctctctgggcttgctggctggtcttcgtaggtgcttgcgctgcctcgatgatcacgatgcttactatggtcaagtggctcgagcgcgtagctaagtaattcacacaagacgctgacccactccgatgtactccgcacaaccccactcgctgagcgcagctcgtctctacttccgtcgctggacacgtagtagcgcagccgtcttccacagcctcgggcattgcgtcaccatcgggcatctctcgtcaagcgtcctggagcgtctctcagcaaagacgacgacgctcgctaccacacctgccgtatgtggcacgcttgctcccaccgaagggagccgtgaggaggccgaagtcctcgaggaagctatgctctcagagctgctcctcgcactcacgcttactcctcagtccacctcatcggcatatcctgcaggctaccttagtgtagctctctgcagctgacacagcgctgtctcgctactacccactccacgataggaggcgggtgtgtagcgagacagcgctttttatatatcgataagatcacacgaaaagactactatgatacaagacatcaaagcacgtatcctcgctggcggtgagatcaccgaagaggaagcacttgctttgcttaccactcctcacaaggaggagctataccaagcagcacacgagatcaccgagcactttatggggaaggcattcgatacctgctccatcatcaacgctaagagtgggaactgccccgaggactgtaagtggtgtgcacagagcgctcactattcgacctccgcagagcgctactctgtcgtcagccccagcgcttgtgtagcgcaggccagctacaatcgcaagcagggtatcgggcgcttctcgctcgtggcgagtgggcgtcgccagaccgatcgagagatcgatatgatgagcatcagctaccgcgccatcaagcgggcacatcctgagctcaagtgctgtgcctcgctggggctactcaccgagccacagctgaagaagctctttgatagcggcgtgacgacctaccattgcaatgtggagacttctcccagctacttccgtgagctatgtacgacacacacgcaggaggacaaggaagcgactctcgaggccgctcgccgtgtaggtatgcgtatctgctgtggcggtatcatcggcatgggtgagacactggagcagcgtgtcgagcttgccttctacgtcaagcgcctgaagagctacagcatcccgatgaatatcctccagcccatcgctggtactccgctcggtaactccactccgctcactgaggatgaagtcctctcggctatcgcagtcttccgcatggtcaatcctcgggcattcctccgcttctctggtggacgcgcacagctctcccccgagacgcaatacaaggctatctacgtcggtatcaatgccgctatcacgggtgatctgctcacgaccattggccgtcaagccgaggatgatatgaagatgatcgaggcttgtggtaaggtcaatacgcccgaggactgggaagtgcactacaactattagtcgccactatcatctatcattatggtacagggtgtactgattaccttcgtcctctatctcttcttcctcttccttatcaccttctggacgcgtagacgaggcacgaatgcggacttcttccttgcagggcgtgctaccccttggtggatcgtctcgatcgggatgctcggcgactcgatctcgggtgtgaccttcgtctcggtgccagggatggtgcagcagatggatatgagctatatgcagctggtcttgggcttcttctttggctacatcgtcatcgcctatgtcctcctgccactctactatcgtctacagctcgtctcgatctatacctatctggagcagcgcttcggacggcatagctatcgtacgggtgcactcttcttcatcatctcgaagctcttcggggcagccgcgaagctcttcctcatcacgcttatcctgcagcagctcgtctttgctccgataggagtgccgtatatcgtcacggtcctcggggtcgtcggcatcatctggctctacacgcagcgtggtggcatgggtacgatcatctggacggacgtcttgcagacggtctgccttgtgctcacgctgggactcatcgtctatgtcgtctcggggcaactggggcttaacctctcgggtatcgtgcgcttggtcagggaagatccccacagccgagtcttcttctttgacgactggacgagcccgctgtacttctggaagcagttcgtcagcggtatcttcatcgtcatcgtgatgacgggcttggatcagaatatgatgcagaagaacctcacgtgccgtacactccgtgaggcccgtacgaatatgcttacctacggcttcggcttcctcccgctgaactatctcttcctcgtcttggggattctcctcctgcacttcggtgcagcgcatggcttgaccctgcctgagcgaggagatgatatcctgcccttcctcgccgcagggcacttaggtccgtgggtcctgatcttcttcacgctgggtattactgctgcttcattctccaatgctgactcggctctgaccagcctcacgacttcggtctgtaccgatctcctcggtatgaggctcgaggatgatgcggtagaggagcaccgtcgctggtggattcatttagctatgtgtgtggccttcgctctcatggtactcctcatcagtcagatccagcagagctccctgctgaagacgatcttcacggcagtctcctatacctatgggccactcttaggactcttcgctttcgggctcttcacacgctgggtggtacgtgatcgcttcacgccctacctctgcatcctctctccctttgtgagctacggcgtcgcagtggcagcggagagcctatggggctataaggtcggatacgagattctcctattcaatggcttatttaccttcctcggcttgtgtctccttcgtgacggcaagcgaggtgaggtccacgtctaatcaatcttttatctacagatgaagcaaacaaacatgcagacctctgtcgcgctacgcttccggcgtatgacgcgcaagagctacggtgccttcaacacgatgcaccgtatcatcaacatcggtacgctcaccagcctggcgctggcttgcgcctacacctccaccgtcagtgcgcagaatgtagctgcgtctgagcctgagtacaacctcggtgagcccgacaaggagcttacgggggtcacggtcacagcctctaagacagctaccccgctgaatgaagctacgcgactcgtcaccgtcatctcggcacgtgagatcgcccagacccctgcgcgaagtatccaagagctgctgaactatgtagcgggtatcgacgtcgcacagcgcggtgcccaaggggtacaggccgatgtctccattcgtggcggctcacacgagcagatcgtcatcctcctcaatggggtcaatgtcagcagcagtaagacggggcacctaagcttcgatttccctatcaacctctcggatatcgagcgtatcgaggtgcttcgtggcccctcagctcttatctatggtacgggtgctttctcgggggctatcaacatcatcaccaagcacagcgcagagacctccctctatgccaaggctactgcgggtatgcaccgcctcgtgggtgcagagctccgtggagcgatgacgtggggcaagacggagaatagcctctcgctgagccgccgctccagtgctggctaccgcacgaataccgactacgagatctataatgccctctggcaaacacgcctaaatctcccagcggagaacaagatggatctccagctcggctacaatgagaaaaagtttggtgccaactccttctattcggctaagtatcccaatcagtacgagcatacccagcgtatgatcgcctcgctgcgtggtgaccttggtggtgagcgcctgcgtcttctccccactatctattgggatcgtgagtacgactgcttcgagctggtgcgtgggacgacctttgggcagaaccaccatatcgtgaataactatggtgctgggctcatcgccaactacagctccctcctcgggacgacgacactcggtggtgagcttcgctatgaggaggtcatcgggaataagctcggtacaccacgcgctaagcccgagagctactacacgaagttcggtagtcgaacgaatgtcagcctcagtctggagcatacagtcaagctggataagtggctgatctccgctgggacgcttatgagtcataatacactcctctcagggaagtataccttcctcccttcggtgagtgtgaactatcatccccttgatcgctggagcttcgtcgctacttggagtcgctcgatgcgtctgccgaccttgaacgacctctggtataccgaccctgtccacaagcatggagacaatctccagcctgagtatgcccactcctttgaggctattgcgaagtaccagacctcgcacgtagaggcgcacctctcttacttcttgatgaaggggagcaacctcattgactgggtgaagttcgaccgcacggagacggccttcacctcgcacaatatcgctgagcttacgaaccaaggtctcgaagctgggctggctcttcgccttggcgagtacctgcccttccttggtgatgcgggacgtctcagccttgactacctctatatgacgcagaggcatcgtgctcctggtgtcgcgatgtctaagtatgcgctgaactatctccgccacaagttcacggcacagctcgcacacaacgtcggctctcgaatagaagccctctgggcgctgcgctatcaggatcgtgtcaatcaagccagtccctttgcgacgcttgacctcaagctcgactatcgtctgacgaatcacctccgtgctggcctcgagctgaataatatcaccgacacgcagtacgctgatatcgctggcgtaccgcagcctggcttctggctctcggggagtatcagctacagcctataggtacgctcccccctttctacgttgatacgtcaagcccccaccgaagtgcataagaagatgcctgaggtcgggggcttgctttatatgcctgtttcataagtgaatagtgtggaggacgtatgtagttataggatggggtgctatgaacctatatagatcgctgacgtgacctatataggtccgagtgacgaccaatataggtcgagtctgtgacctatatagctcttcccgctgacctatatgagactgttgcggcagagtcctgccctctatttattcagctaaggcatcgcacgcccagctccctgatatacccctccgaagtgatacgcaagctcctcgccttatcgtgagtattcctcttattcagcggagggaaaagctttgttttcgtgaagaaaaatgcaccttcccgtagtggtattcttctatctatgtacgtagtcttaaagaccaggcacgtaaatccaaatatccacgtacgtagatattagagccacgtacgtagtccaaacttatctgctactcgtccagaacttttatccctacgcggagcaacaacctaatagaggtcacttcacaaagctatatagggatcagtccaaagcaatatagctttcttcgtcatcctatataggttcatagcacctactccaatggaatgctcttgctcggataataggagaggggcctattctttacgctttgactggggagctgtgtcgcacgctcgtgtggtgctgatcactcctcgtggaggtgcctgcaggggagatagcaaggtggctgtgtgagtctacgggcaggagctgttatctttttgtatctttgctctatgtgcgcacgtctgaaactgccccgattgatctggggtgcgtgtggcacgaactaaagagaatagactgacgtatataataaggtataaggactgatgggaaagaataacctgatcttcgggatccacccacttatcgaagccctggaggcaggtcgtgagattgataagatcttactcaagcgcggactgcgtagcagcgaagtgagccatatcatggatgtggccaaggagcgtacgatccctgtgcagatcgtccccgaggagcgcctgacacgtctgacgcgcaagcagcatcagggggtcatcgccttcatcagcgagatcgagtacacgcagctggatcagctcatcccgatgctctacgaagaaggacgctctcccttcgttgtcctcttggacggactcacggatgtgcgaaacttcggtgctatcgcccgtacggcagagtgcgctggtgtggatgcgatcatcatccccgagcgagggagtgtgtcggtgactgccgatgccgtcaagacctccgctggggcgctccaccgtatccccgtctgccgagtcagctcgatacaggctgctgttaccctactgcaggagaacggcatccagatcgtcgctgcctcagagaaggccgcagatatctataccgagagtgagctgtcgcttcccctcggtctggtccttggggctgaagatcacggggtgtcacaggatgtcctgcgccgtgcggataagatcgtccgtatcccccaggtcggtgctatcggttcgctcaatgtctcggtcgctggcggtatcctcatctatgaggtcgtgcgtcaggtaggcctcggtgctgagtgatagccctttcataatagctactctacactatgctcactaagatctacgctgactcccccgactatcgcttgctcaccgagcttgtcgatgagctccgtcgtggtgcgatcttcatctatcccacggcttcgggctacgcctactgctgtgacgcgctgcaccagcgtgccatcgaggagatctgtcgcctaaagaagatcgacccgaagaagaaggcgctctctatcgcctgtgcttcgctgagccaggtgtcagagtactgtaagatgaatgaccgcgcctttaagttcatcaaggatcacgaggtcaactataccttcatcctcccagcatcgggtgccctgccacgtatcttcaagcagcgccgtgaggtgggtgtccgccttgcccagcatcctatcggccgtcttcttgccgagcacttaggcaatccactgatcacctcttcgctccccatagaggatgaggacgagcccgagtattgcaccaatcccgagctcatcgacgagcgctacgggaatgccgtctacaccatcctcgatgctggcgacatcccgctggctccctcgacgatcgtcgactgcacagaggagcccttcgaggtgctccgctatggccatgggcgcctggccgatgaggagcccttactcaagaaagattagactacagcatatcacttatgtcgaaagaatctgagcttatagcttactatactgacgaagacgtcgaggagcctcgcctccgagagcgtgtccttcgcaactggatccgtgaggtcgctgccagctatgaccgtcgtgtcggcgagctctgctaccagttctgtggtgatgagcgcatcctgcagaccaatcaagactttctcgatcatgactactataccgatatcatcaccttcgacgagagtgaggggaatgtgatctcgggggacatgcttatcagccttgatacggtgcgtagcaatgccgagctccttggcaacgagtatgccgaagagctgcaccgtgtgatcatccatggtgtcctccatctctgcgggctcaaggataagagccccgaggacgaggagcgtatgcgtgaggcagaggataaggccttgatccgactgcatgagttggtcggtgaagggacgccactctttgactaaagtgatggcttcatcgtgcctcggcgcggtgataggaagccgctcctcttaccgtagttgcggtatattccagataaaagccgtttctttgtggtatcattgactatctgaccactaagtgaatttaatcatcgatcagggaaactcggtctgcaaagtggccgtggcggatggaggtgagctcatcgcccactactccttccctcaagtttccctacgagaagctggggtcatcttatccgatcatccagctctgcaggcggcgatctatagctctgtcgcagctgtcgacaagatgctactcagcctgctcgctgagcgtatccccaccgtgctgcaggtcgacgagcatatagccgtacctgtaagcgtggcttacgaccgcaagcgcctcggtagtgaccgtatggcggctgtcgtcggggcacatactctggcacccgagggtgtcagcctcttggtcatagacctggggacggcgatcacctatgagcagatctcccctaagggggaatataccggggggaatatctccccagggctctatacccgactcaaggcgctgaatcacttcacctcgcgcctaccgttgatccacgagatcacgcctcccgtacgagacttcgggcagacaacctccgaggcgattacctcaggagtgctccgtggagtgatctatgagatcaagggatatatagatgaagctaaggcgtcagaccctaatgtcaaggtctacgtcacagggggcgatgctcctctcatcgagcagtacctccccgaagaggtatgcgtagagcccgacctcgtcctctatggactgaataagatactggagtacaacagatgataaagcagaagaagatcctcagctacctcctctccgcaggactacttacagctgggacagcaggcgcccttagcgcccagagcaactcagaccgctcgccctatagtcgcttcggctatgggacactcggtatgcgccagacggctacgacacgagctctcgggggtatcggtgcgggtctgcgtgacggcctcgtcgtcaaccccgctaaccctgcctcctataccgctgtcgactccatgaccttcatcatggatctggcagtgtcgctgcgtggatctcacctcgctgagggcgggaatcgtgatagccgtgtcttgggtaaccttgattacgctacgatcctcttccccgtgagccgtcatatcgcggtcagtgcagggatcactcccttctcgaccgtgggctatcgcttcggtagcctcgagaagctccagggagatagccagaataactatcaacgtacctatctgggacagggtggcttcagcgacctttacctcggtgtagcagggcgtattggcggtttctccctcggggtgaatggctcctatgtcttcggctacacgacgcaggagcgtcaggtatatatcgggtcggatggtgcatccaatcccttctaccgcacgcagctccagctcaagggcttcaaggctgatatcggtgcgcagtaccagctggatctggatcagaagaagggacgtagcctcgtcgtgggtgctacgttcgcccctgagatcaagctccgctcgacgctcatcgatcagcacttcctcagcgcagagaattccagccagcttgtacccgagtcctcagatacgatcacctcacgtagcctccaccatgtgcctatgagctactcggtcggtgctacctatcgccatagtgagagcctccttgtcggagcaggcttcacctatatgcagtgggctaaggctaccggtcttgctcaggatggtgctgcacctcgcgatcactatcgtgtaggccttggtgccgagtggatccccgatcctcgtggtcgtggactcttctctcgctcccgctatcgctttggtctgagtggggctaactcctatatgctcgtcccaacctcctcgggtgagcagaagggttacaatgaactcaccgcatcggtcggtatcggtatgccgctcatcgaccgtcgttcgctcgtcaatattaccgtagactataagtacctcactcctcaggccaccggtatggtgcgtgagcactcacttggcctcactgtggggattctcttcaatgagaactggttccgcaaggcacgtatcaactaggggttatatagccttgctatggactatccgccgctctatatggtggaggtctacggccgactatgcgctaatcatttacacactaaagacaagagacaatgaaactgaacagaatgatcctggtagcagctctcggacttctctcgacggctgcttatgcccagacgggtagagctacaggtactccttttggctcaggtgaagacagcatccgctgccgccaaagtatcagcctgctgaccagctttggtaagacggcgaactatgccgacgcctatgagcattggcagaaggcgtacgacaactgccccgcagcatctaagaatatatacatcatcggtgctaagatccttcactggaagcttggtcaggctaagactgcagatgaaaagaagaagatcctcaaccagctgatgaagctctatgacgaccgtatcacttacttcggtgatgatgctaaggtcggtacgcctcagatcctggctgataagatcgaggactacaagacgatcgcaggtgctgatgcagacttcacacaggtctatcagtgggctaagcctgtcgtagagcgctacaaggccgagtcgcctatccagctcctctactactatgtcttcagctcgcgcctcatcgcttctaaggatgagtcgaagatcgaccagtacatcaacgagtatacgcaggctgctgagtacgcagatgctatcctcgctgctgctgagacagacgaagctaagaaggtcatcgagacgtacaagaatcagatggacacggagttcgctcagagcggtctggccagctgtgacaagctcgagaagacctatacggtagagaagatcgatcagcataagacggataaggccttcctgcagaatgtcctcgcactcttccagcgtgcaggctgcgatggcaatgcttctgtacgtgccggtcgctacctcttcgatatcgagccttcggtcacggcggctatgggtatcgctggtgaagctatccgcgataagcgctacgctgaggctacggagttcctcaacaaggctattgacctggctaagaactcttctgaccgcctcaagtgctacgaagcactcttccagatcgctcaggtacagcgcaacagtggtgcagctatctcttacgggaacaagatcctcgctgagaatccccgtaatggtcgcgtactgctctacctcgctgagctctccgctggtaatgcttctcgctactatcccgatgacaagatcaagcagcgctgctactactatctcgtcatcaataagctccgccatgctgccagcgtagacccctcggtctctgctcaggctaatcgcgctatcgccaactactctcgctacctcccctctgcacaggagatcttcatgcatcctgatatcaagaagggttctacggttagcttcggtggcgaaagtgtcgtcatcccctaatctacatagctcgctctatgtctgatctcccttcgcacttaggtgcaagagagagggaagaagccctccgccgtctggatactccatccagacagcgggggacttctcgttcgtatcccttcgctatgctctttgtcttctgcacgctcttcctttcgctgggggcatgcagcaagaagaaagtcgaggtgaagaatctggcggtcaatcccgactcgctctatacagctcgtatggtagcgctcaatacgctcatctcggactctggactcatccgctatcgtatgaccgctcccgagcttctgatctatgagcgtaatgaccgcaatgaatgggtcttcccacgtggtcttgtcctacggccctatgacctcaagagcggtagtcaggtcttcatcaaggcagactccgctatccgccgaccgctcaaggaggagtgggagctcatcggtcacgtccttgtccagggacctgatgggcagcgcctcaagacgaagcgtctcttttggcttcgtgctgagaagcgcctctattcggatgatacgacttacttcctcacccaaggcaaggagcttcgtggctcccacttcaatgctaaggatgatctcagctggtatgagatctacgacaacaagggtgcctttgactacgacgagaataaggcgacctcacctactgcacctgcagccccacgggccgatacgctgaagcaagctccccatctctaagctcttcagcgcagtgtgctctcaccatcgacgatgatttacctctatatattcctctgcctaattgcttcggccttcttctctggtatggagatcgccttcctttcttcggataagctccgtcttgagcttgaccgaagccgtggtggtgtgtcggctcggatcttaggtgtcttctactcgcgtcccgaccacttcatcacgacgatgctcctggggaacaatgttgccctcgtcatctatggtctcttgaccgctgtgctgatggagccttggctcaagagcctcttgggcgagaatgatgggctcattctcttggcgcagtcggtcctcagtacgctgctgatcctcttcgtcggggaattcctcccgaaggtgaccttccgtgctaaccccaaccgcacgatgcgcttcttcgcagggatcctcttcctcgtctatctcctgctctatccctttgcttggatcattgggctgatcacgcgtgcgatcctcttcctcgcagggcagcgtacttcaagtgtggctattcgcccccagctctcttcactggacctcgagtactacctcacgcatagctcggacgatggtcaggcctcgggtatcgagacggaggtgaagatcatccaaaatgccatctccttctcgggccttcaggtgcgtgattgcctccggcctcgcaatgagatcgtcggggcaagcattgactcgacgcgtgcgcatcttgaggaactcttcatccgcacgggactctcaaagctcatcgtctataaggagaatatcgacgaagtcgtcggctacatccattcgagtgaaatgttccgcggtgacgactggcagaagcgcatcgtctcagccctcttcgtccccgagagtatgcaagccagcacgctgatgcgcctcttgatgcagaaaaagaagagtatcgcagtcgtcatcgacgagcttggcggtacggcaggtatggtgacgcttgaggatatcgtcgaggagctcttcggagatatcgaggatgagcatgaccgtcagaagcgtgtagccaagcgccttgatgatcgtaccttcgtcttcagcggacgtatggagatcgatgatatcaacgagaagtttggtctgacactccccgaggatgaggacttcatgactatcgctggctacatcttgtaccaccatcccagcatcccttcgcaggggcagatccttgagatcggtgacctgcgctttgagattctccgctccacatcgacgaagatcgtcttggtcaagatgaccctccccgaggcatagtgcctccctcccttcgcaagggaaagccatcaccctaccgctcacataatcctgtggcggtagggtgatggcttttattattgactgcttgagggggcgatcaatgcattcttatgaggagaccattgcgcaaggccatctcttcacagcttgcacttttctccttcgaacttctcagcctaaagcctccgatttttgagggagggaggtacgagtaatgaagaggaggccttgcgcaatgctcccacatataggtatatgagtacgtgggtagagctatataggatggcgaagaaagctatatagctttggatcgatccttatatagccttgtgaagtgacctctattgggttgttgctccacgtatggataaaagttgcggacgagtggcagataagtttgggctacgtacgtagctctaatatctacgtacgtggatatttagatttgcgtgcatagtctttaagactacgtgcatagatgcggaaaaagcactacgtgaagatgctttttcttcgcaaaaacaacacttttccttccgctggataagaaaaatactcgcgatgaggcgaagggcttgcttgaccacttcggagaggtatatcggggagctgggcgtgcgacaccttagcacaattaatagcgggcaggactctcggcaacagtcttatgaggccgtattgtatgagctggtggaagctatatagctcttcttatatttctatatagcttcgtgagcgttcctatataggattgagttgattcctatatagcttcgtgatcattcctatatagctttgcgcgcattcctatataggattgcgctgattcctatataggtctacttgtattcttatatgagtcatagtgcggatccgtatcggtagggagcctgtctatcggttgactttgtctgatcctcggagctctatgctcacggtctatagcgaggaatagggcctttcagcagaagggtcatgcctccttctaagcggggatgggactgtatttgcctgcaacgtgcctgatattataccgtctgcagggttgcggtattgatggaaatcactatttttgccgtgtaatcgatttatttataatcaaactacaatcaaaaatgatggacctttttaagaagcttcaggggcttttcgggggagataactctgccgaagctatcgagaagcagatgcagaagatgcaggagcagatgcaagctgctttcggtggtgaagagaccaagcgcggctggcagcccgatgaaggcgtctactatgccaagggtgagtacgacaatgccgtcgagtacaacaatgagctcatttgcctttccaactatggtctcgaccagatggcgaagatgaatgatgcgatggatgccaaggattacaaccgcgctgagtgggttcgcctggagtggatcgaagatctcaagggcttgagagagcaggctgctgcgctcggtgcctatgatggtgatgaccgtatgctcaaggcgctctataaagtcttcgatggctgggaagctctgatgaaggatggctacaagaccctcatcaagatgcgtctcgatggtctccgtggtacgcctgaagaacaggcacagctcaagaagaataataccatcttggtgcgtctcatcgacaacctcaatgatgcgagcgaggagttcctcgatgctcacggtgtcggtgactacgactatgatgatgatgacgacgaggattaatcgtcgctgagccacacgctcactttcctactttactatataagagcagcctactgcatcccctcactgagggctgtgcagtaggctgctcttcttgtatcaaggatagcttggctaccccttcacttgtagaatcttgggcgctggctcatggaggtagcagagatagcccgatacctctgtgtagcccatctgacgaagaagctccatatactcacggacttggcggtggtgacccttacgctcctccccagacttatagtctacgacctcgatatggccatcggggtagaagatcactcggtcaggacggcggctggtctccagctctccaccgatgatcgcacgctcgttgaagatcctccctgtgccgtcaaaccatcgggctgcttcggggtgctctacgacagcacggagctgggtggagagttcctccgcatgctctgccttgatatatccatgatgtacggcctcgctgatggcaggtgctacatcgcttgcggtctcgatctcagagaggatgaggtgcagggtacgcccataggcccgctggctatcctcggagaagtactcgagaccctcacgaaggatggctaagcgctggtcaatagggtaggagcttagtgcacctacttgcagagccgtagcgctatcctctccggagtcggagtgcttcttctttggtgcagaagtactgtcacctatgggatcctccttcgtcgtctgatgagcggggaggatctcatagagagccttgtcttcttctacggtggccaggaagaggtcttctatcttggagatcttctcctcagatgtttctttcttcttggacttcttcttcccagactcctcttcctgtcccttctgggcttcctctcggatccagatatgaagctcttgcttggggcgcgtggtggcgacatagaggaggttgagcgagtccatcatgttcttgagcttttccacaaagtagggcttagcgaagtagctcatctgcagcgtggcagtgtacttcagagggacgctcgtcacgtgcgttgccataagctcttcggtctcgctgatatgggggatggggcaccataggatattctccttgttgccgctcaaggcttcatccagcttccagctgatgtcggggagtaggacgacggggaagccaagccccttggacttatggatggtcatcagggtgatagcatcctcggctgagttgttgacgatactctgcagatggcctttatcttgccagtactggaggaaggtcgagatatctgcagcctcctcttgctcccagctatagagcatgtcgaggagcttgacgaggtaggcgccttcgctctcggggaagagcttcccatagcgtgagttgatgatctcgacgacttcgtagagcccttggcgcccgaagtcacgcagctcttgtagctcggcttcggataggtcttcttccgcttgccccgagagggcgaggacttggtgataggcttcttggaggactgctaatcgtagtgggatgctggtatctgccagatagctgagggctgcgatgatgaagcgtacggagtatgcgcggtcgacgtgtagagcttcctctgagaggaagggtagggagtagccctccagtacgtcatcgggagcgttgaggagagtctccgctacattggctgcatgcgccttcgtacgaacgaggatagcgatgtcggagcagcgatagcctcgcttgagtaggtcgacgaggacaagcgggagttgatctaaggcaccgttgggtacttcctcttcggtgtctgaagtctcttcgctgtcctctccctctgtggtgctatcatccttctttttggggggagcatagcgatggagtacgacttgcccgaggcctcgctgttgctttggcttaggagtattctgctccacgtcttcataggccttgaggaggatgtccagctctgcatccagtcggctcttgacttcctcttgcccttcggggaagccgtagcccctgacctcgccccaaagtgaatcgaagacactgcggatgagtgagcagagctgtgggtagagagcgttgttgaagtctacgatctcggggacactacgccagttgtcctcaaggtttttgcgctcagcggaagacttaaagtcctcggtgagctgtgtggtcagtagggtgctgtcggagttgcggaagcggtagatactttgcttggcatcaccgacgatgaggcagtcctgaccttggctctgggcattatcaaggagaggcttgaagttctcatactgcatacgactcgtgtcctggaactcgtcgatcatgtgatgctcgatgcgcgccccgatcttctcgtagaggaagggtgcatcattattgtccttcagtagcgcttggatgagcgaaggtgcatcagagatgagcatgagcttaccctctcgcttgagctcttggagggcattgtcgatgtcgatcagtatgccatagagccccgcatatcggttgatctgctgggctgtgacgtagatggggagctgctggaagttgtagtcgctgaaggctttgagggcatcatagatgctgctgaggtggggctcgatctgctcacggatagagtgtttgcctttacttcctactagcttagccagcctcgtttctgtgtctgtagcagcaaggaacccttgtaggtaggagcgctctgcaagaggtactccgtctatggtaaaagctccttgcactctttgacaggcataagtcgctccaaagactccagacctcttgttgcttaaatcttctattgctaccccagaccgcgccagtacattgagtgctatttcagcaagggcgctgagcgcttccctcttatccttgatgatcttacgagctgcttcacgtagcttcttgacctgcgcttgggaggggaattccttgcccgcacgtagctgcttgacggcttcgttctcgagttgcttggcgaacttgctgagctggtcttcgatattgtagcccttcccatcttcgatcgcctcggtagttagctcttggagccaagcttcgatcttttcgtcgctcttctcttgatcctgtcgggctaagacttcgaggacggcctgatgaaggagttggtccgagtcaagctgtacacggagggccccagcatggcccagctcataggcgaaggagcggacgacctcttggaagaacgagtcgatggtacgcacacggaagttcgtgtactcaagtagcagggcatgcagcgtcgcattggctcgctcctgtagcttcgcctcagagataccaagctccctgcatagatcatctgtgaatagggactcctctggggtgcgtgcgagggtagagagctcagcgacgatacgccccttcatctcagcggtggccttcttagtgaaggtcaccgcttggatagtcgagaagtatctggggtcgccattgctgagcatcagacgcaggaactcgcgtgtgagcgcgtgcgtcttccccgatcccgccgaggcggtatatatcttgagggacatgagcttggggggcgaagcgttagtattcgtctggggtactggtcgtgtcgagcttctcgtcgtctcgccctcgattgtggtagtgacggcggagaggattgcgcgtagcctcgtcgtagctacgacggtggcggtagatgtccagtgcgctgtagatagcctctcgcatcgaggtggggtcagcgatacccttaccagcgatatcgtagcctgtaccatggtcgggggatgtgcgtacgaagctgagtcccagcgtgacgtttaccccttcgttcatatacagcgccttgaagggagctaagccctgatcatgatacatggcgaggatgccgtcgaaggaatctacacgcccgctgccccaaaagccgtccccagggaagggaccaaaggtgatgatgcccgaggtgaaagcctcctcgatagcgggacggataatcgtatcctcctcgttccccataagccccttatctcctgcgtgggggttaaggccaagtacggcgaggcgtggcttcgtgataccgaagtctctctgtaggccagcctcgaggaggcggagcttgcggaggatcagttcgctcgagagtcgtgaggcaatagcactcacggggatgtgtgtcgtagctaaggccacacgacagtcgcccgaggcgagcaccatcagtgattcgccaggtgtgcgtgctgcgatcgcctcgaggtaatctgtatgcccattgaatgggaagaggtcgcgtggcatcacggccttattgatgggggctgtgacgaggacgtcgcagagtcccatgcggatatctgccgtagcacgctcaagggcttcgaaggcagcgcgcccagccgcgtcggtgggctggccgatctctacctgctcacgtcccgtggtacagtcgaggatattcagcacgccgtccttggcttcgcttgcctgacggatgacctgccaagagacatgctcgaggccgaggtgcgccttccagaagtttgctacgtgcgaagagccgtagagaataggggtgaagagctcaaggatgcgctcatcctcaaagatctttagtacgacttcatagctgatgccattgatatcgccgtgggtgatagctacccgtatcttgcgtgtactcattgtcagactatggattagaagcccttggtgtagcgagccttgagtatgatcccagggtcaaagaccttgatagcgctggggcggaaggagtagagcgaagactccatcatgcggatgaggtggagcttgtcctcgttggggcggtagacgaagccctcgaagatgtagaccttgcctgcagccttgtcgacgacagcatggctgacgaaggggccacccatcatcgcaccgccttccatcttccacagaccacggagttcagcacgcgctgtctcctcttcggggagctgtacacggcggtagaggaggccatagttctgctcggtgcaggggtaggagccttcgaattcccccgagatattagccttgagtacggagtctcgcttggcgaccagagcatcgaggctgatatccttggggctgtggtaggggtaagtgtagacgaggatgtcgtggcgagagcgcatagaggagttggacatccagaggaagtccttgccgacacgcttattgcgaatatcctcagggacattgacgcgatgagcgaagaggctatcaacaagctcggtagccttctggctgtaggtcttagcgataacctcgccgtagaggaagagttcgtggcgaatgaagagattcatcagcccttcaccctgagtcttgaggtagttctgtaccgagtcggcgctgggtgaggtcatacgcgcgacgatctgccccttggcccagtcgtcatagctgtacttcagcgagacctttgagtagcgctgagggtcgatgtcgaggaggaagacattgcgtacgagcttcagcgagccttcgaaagatggggtagggacgcgcgagatgcgtagagagggctcgctctgaggaagggcaggggcatcttcctcgagtaggtcatagagctgcatcgccataggggactcgaagtagtccttctccatgacgagcatcagctcgcctggcttcccgatggcgctctgctggagtacggaggagttcttggaggacgatttgcaggagccgaaggctaatatgcttgcgatgagggcgggtagggcgaagcccatccgatagttgatcttcataaggcgtatgttgctttgtctatcgtgcttatttacagtaaggcaaagataaccaaagtggcacagactaccgcagggagtagctctgtgctatggggatcctttccatccagtacatggggcggctatacgtcgatttttatgatcacgaaggggctatcctatgtgtaagtatatccgtgtcttatgcaaggtgaagaagtgaacctccatagctgggtaaatgaacctatataggtcagacctccgaccaatatgggtacggggtcgggctatatagggatggtgaagcaagctatatagctttggactgatccctatatagctttgtgaagtgacctctattagattattgctccgcgtagggacaaaagttgtggacgagtgctagaaatgtttggactacgtacgtggatttaatatctacgtacgtggatatttggatttacgtacctggtctttaagactacgtacatagacagaagaaaaccactacgtgaaggtgctttctcttcacgggaatgacgcttttccctccgcaggataagaggaatacttgcgataaggcgaagggcttgtgtatcactttggagaggtatatcggggagctggtcgtgcgatgccttagcactctaaatagagggcaggactcgcggcaacagtctcaatatgggtcgcgaagggggacagtatagcggtggtatgcactccccattgcgacgaagagattctcgataaggctgcttcccctcgcgtgcgtacattctctctatatgtgtagaggcgggtagtaaagagctcttgtgtggtagggcttctacactacctataaataccgtacctttgcgggacaaataaagtatcatataatagtaagcaacaacgacacaatgacctctaaagagattcgcgagtcatataagtctttcttccaaagtaagggccacacgatcgtaccatcagctccgatggtggtcaagggcgaccctaccctgatgttcacgaacgcagggatgaaccagttcaaggatatcatcctcggtaatgccgagatcaagcatagccgcgtggcggactcacagaagtgccttcgcgtaagcggtaagcacaacgacctcgaggaggtgggccatgatacgtaccaccacacgatgtttgagatgcttgggaactggtccttcggggattacttcaagcacgaagctattgactgggcttgggaatacttgacggaggtacttcacctctcccccgagcgtctctatgtgacggtcttcgagggggctcctgctgaaggccttgagcgtgatgacgaggctgctgctatctgggcaaagcacctaccagctgagcgcatcatcaacgggaataagcacgacaacttctgggagatgggtgatcaaggtccttgcggcccttgctccgagatccatatcgacattcgctctgacgaagagcgtaaggctgttgatggcctcacgctggtcaaccagagccacccccaggtcatcgagatctggaacctcgtcttcatgcagtacaaccgtaaggccgatggctctctcgagccactgcctaagcgcgtcatcgatacggggatgggctttgagcgtctctgtatggctatgcaggggaagacgtcgaactatgataccgatatcttcaccccgatgatccaggctatcgccacgctcacggggatcgaatatggcgctgatcagaagtccgatgtcgctatgcgcgtcatcgctgaccacatccgtacgattgccttcgctatcaccgacggtcagctcccctccaacgctaaggcgggctatgtcatccgccgtatcctgcgccgtgcagtccgctatggctataccttcctcggtcgtcgtgaggccttcatgtatagcctcctgcccgtactcatcgagacgatgggcgatgcttaccccgagctcatcgctggtcgcgagctcatcgctaaggtgatgcgtgaggaggaagagagcttcctgcgcacgctggagacgggtattcgtctgctggataagcagatcgaggaagcaaagaaggctggtaagaccgttcttgatgggcacgatgccttcgtcctctacgatacctacggcttcccccttgacttgaccgcactgatcctcactgagcaggggctgagcgtcgacgaagcgggctttgacaaggctatgcaggagcagaaggagcgtgcacgtaatgccgctgctatcgatgctggtgactggcaggtcgtcaatgatggctctgctgtacgcttcgtcggctatgataccctcgagtgtaccacggagatcctccgctatcgtgaggtgaagcagaagaatgctaccttctatcaggtcgtcctctctgagactcccttctatgccgagatgggggggcaggtaggtgataagggcttcctcatcgctaccgatggcacgaagtacgaagtctttgataccaagcgtgagaataacctcgctatccacctgatgaagaagctccccgctacgctggagggtgacttccgtgccgtggttgacgaagagcgtcgtcatcgcatcgaggctaatcactctgctacgcacctcctgcatgaggctctgcgtgaagtcctcggctcacacgttgagcagaaggggtcattcgtctctgatgaggtcctgcgcttcgacttcgctcactttgcgaaggtcgagcccgagcagctccgtgctgtcgagcgtatcgtcgcagcacgtatccgtgcctgcatccctctgcaggaatatcgtgaggtgcctattgacgaagctcgcgagatgggggctatggctctcttcggtgagaagtatggggatcatgtccgtgtcattcgctttggctcttcgactgagttctgtggggggacgcacgtcgcctctacgggtgtgatcggtacgctgcgcatcacgagtgagtcctccgtcgccgcaggtgtgcgtcgtatcgaggctgtcacgggtgcagctgctgagaactacctctatgagcaggctgatatgatcgatgctatccgccagctcttcaataatagcccccagctgaagacggctatccgcaagactcttgaggagaacgccgagctcggtaagcaggtaggggagtacatccgtgagcagatcgctgagaagaagcgtcagctgctggagaagcgtgtcgaggtcggtggtgtccgcctcttcctcgttgagagggaggcccctgctgagatcgtgaaggatatcgctttccagatcgcaggtgagcttcacgagcccttcgtcttcatcgctgcttgcgtagagcccagctcttctaagcccagcctgacgctaatgatcagcaaggatctggtagagtcaagaggctggaatgcttcacagctcctccgtgctgctgccaagcatatccagggcggtggcggcggtcagcctcacttcgctacggctggtggtaagaatgccgatggactcaacgctgctgtcgaagagctcctcacggctatggagctgaaggcataagcctacccactgtccggatgatcatcggtacacagatactcgatcgcaagctcccctcagtcgctgaggggctggcttgcgatcgactctttttagtcctggaggagcgtgtcgcagagctccatcccgacctccttccacagctgcagtccgcacttcccgaggctatatgtcgtacgttgcgaggtggcgaggagtgcaagacgacggagtcgctggggctcctatggacttggctcagtgaagagggggctacccgccgtagtgccctcgtcctcatcggtgggggagccctacttgacttagggggcttagctgcctcgacctatatgcgtggcatagcgacggtctatgtgccgacgacactgctggcgatggtcgatgcctcggtaggggggaagactgcgattgacttcctcggggtaaagaaccttattggttccttccaccctgcccgtgaggtcatcgttgatattgacttcctgcgtacccttcccttggaggaactcctctctggctatggtgaggtcgtcaagcatgccacccttatgggcggagaggcctggcgaggggtctgtcatattggcgacccggttggcctcatggatgacgaatggcaggccctcattgagaagagtattgcctacaagacttccgttgtggaggctgatcctacggagcgagggcttcgtcgtatcctaaatatcgggcatacggtagggcatgcactggaggcctactcgcatcagaatgaatttcgccgcacactcccacatggtgaggctgtagtctttggactacttatcgagagctatatcacgatgtgccagcgtgggacgagcaaggagtacatccgccagctgatgaccttggcccgtgagctctactcgcccttcttctatacctgcaaggattatcccgagttgctgcgccttatgcggcatgataaaaagaactctgtaggcaccattacgcttatgggcgtcatcgagcctggaaatatcgaggcggtagaggttgcggatgagggagttattaaggaggggcttgattttcttcgcgagacatttggtagttagccaccttctccttatctttgcagcgcaaaagggacaaagcccaagtggtgagtctccaagagcactcgggatgtagctcagcccggttagagtactcgtctggggggcgagtggtcgctggttcgaatccagtcatcccgactgaatatgatgcgagtagaagtgaatccacttctactcgcattgcttttatagtcccctatactaaggtatagctatggtgcttcgctctgggtggaggatcatgctatggtgccttactcttctctatctattacctgcgctataaatcccccgtaatcttttgtatttttgtagagagaacaagcacttatcactcggtgtgcaggcctctggctggctaccgatcaaggaaaaagaatatatgtatcgcactactacctgtggcgccctgcgcctcagtaatgtcggggagcaggtgacgctcgctggctgggtccagaaggcacgccgtatgggcgggatgaccttcatcgaccttcgtgaccgctatggtatcactcagctcgtcttcaatgaggctcacgtaggcgaggctctcgtctcagaggctgagaagctcggtcgtgagtacgtcatccagatcacgggtgaggtcactgagcgtgagaataagaatcctaagctccctacgggggatatcgagatatcggtcaagacactgcgcgtactcaatcccgcagaagtgcctcccttcactatcgaagatgataccgatggtggggacgacctgcgtatgaagtaccgctacctcgacctgcgtcgtagctgcgtacgctccaaccttgagctgcgtcaccgctttgctcttgctgtgcgtcgctatcttgatggtcagggcttcctcgaagtagagacgcctgtcctcattaagtctacgccagagggtgctcgtgacttcgtcgtgccctctcgcatgaaccccaaccagttctacgctctgccccagtctcctcagaccttcaagcagctgttgatggttagtggctttgaccgctatttccagatcgtcaagtgcttccgtgacgaggatcttcgtgcggaccgccagcctgagttcactcagatcgactgtgagatgagcttcgtcgagcaggaagatgtgctgacgattttcgagggtatgacccgctatctcttcaaggagttgctcgatctcgatatccagacgcccttccctcgtatgagctggcacgatgcgatgaagcgctatggctctgataagccggatacacgcttcggtatggagttcgtcgagctcaaggatgtgctctcgggtcatggcttctctgtcttcgatgatgcagcctatatcggcggtatctgcgctgagggtgctgcaagctatacgcgtaagcagctcgatgctctgactgacttcgtcaagcgtccgcagatcggtgctaagggtatggtctatgctcgtatcgaagctgatggctctgtcaagagtagtgtcgacaagttctacagtcaggagacgctgcaggagctggcacgtgcgatgcaggctaagcccggtgacctgatcctcatcctctcaggtgatgacgcgatgaaggtgcgtaagcagctctgcgagcttcgtcttgaagtgggcaatcagcttggtctccgtgataagacgaagttctcctgcctctgggtggttgacttccccctcttcgagtgggatgaagagactcagcgcttctacgctatgcaccaccccttcacttctcccaagcccgaggatgtacctatgctcgagacgaatccaggggctgtgcgcgcgaatgcctacgacatggtcatcaatggtgtagaagtcggtggcggctcgatccgtatccacgacagcaagctgcaggcacgtatgttcgacctcttaggcttcactcccgagaaggcacaggagcagttcggcttccttatgaatgccttcaagtatggtgcacctcctcatggtggtctggcctatggcttggaccgctttgtctccctcttcgcagggctggatagcatccgtgactgcatcgccttccccaagaataatgctgggcgtgatgtgatgatcgatgcgccttcgctgatcgatcaggagcagcttgatgagctttatctcagccttgtaaccccgacgaagtagcctaatcccttagacttatggtatatcgcctattaatgctctccgatgagaatgacttcttcaagagagagcttcagatcgactccgaagccaccttccttgagttgaatgactttatcctcgactcgctgggctatgctcgcaacgagctgacgaccttccacatctgtgatgaggagtggcagaaggagcttgagatcacgatgatggatatgggagcttcttcggatgaggatagctacctgatggccgacacacgcttggaagatctgctggatcataagggacagcacctcttctttgtcttcgatatgctgagcgagcgtggcttcttcattgagctggcagagctaatcccaggcaagagtcttgataagcctgtcgtcacgaaggctgagggtaaggctcctaagcagctggagagcattgaggtagcagcctcccgtctggcaacgcccgctacgggtgagccatgggatgacgaactcttctccgacgaatccgtcgatgaaggggatatcgacctcgaaggcttcgacatcgctgatgcagagagcctctactaagcaggaggatctccctacacttatcgtgcttgttggccccacaggggtaggcaagacggcgcttagtattcacctcgcgcaatacttcggttgcagcatcctctcggcagactctcggcagatcttccgtgagatccctataggcacagcagccccctccgatgaggagcgggctgctgtgcctcattattttgtcgggacaaggtcggtcacagagccatatagtgccgctaccttcgagagtgaagtcctggagctcttgccccaagtctttgctgaaagttcttcttccacggcacttctctccggaggctctatgatgtatgtcgacgctatcacgaagggaattgatagtatgccagatgtgcccgaggaggttcgctcagtcgtctgggagcgctatgccgcggaagggcttgacgaaatccttgcggagctgcatctcttggatccagtctattataaggcggttgatccgaagaactataagcgtgtgctccatggctatgaggtgtgtcttgctacagggcgccccttctcctctttccatacggggcagcagaaagctcgtcccttccgtattgtcaaggtcgggctcacccgagatcgcgaggagctctatgagcgaattgataagcgcgtcgagctgatgatcaaggcgggtatggtggaggaggcccagcgagtctatccgcttcgtagccttaatgcgctcaacaccgtgggctacaaggagctcttctcctactttgatggcgatattgactttgccgaggcggtgcgacttattcagcgaaacagccggcactacgctcgcaagcaactctcttggtggcgacgtgatcccgagatacggtggttccatcccgatgcctgggaggagataattgcttacatccagcaataggggctttgttccaatataagtatggggtgcgtaccactattggtgtgcaccccatacttatattgctttagtggtgaagcaatagggatcaagatcccataccaataggaggctgttgccgcgagtcctgtcctctacttattgtactaaggcatcgcacgcccagctccccgatatgcctctccgaagtgatacacaagcccttccgccttatcgctaatattcctcttatccagcggaggaaaaagtaccattctcgtgaagaaaaaagcaccttcacgtagtggtattcttctatctatgcacgtagtcttaaagaccaggcacgtcaatccaaatatccacgtacgaagatattagatccacgtacgtagtccaaacttatctgccactcgtccacaacttttatccctacgcggagcaatcacctaatatagctctgcggggcgaccagtattggtcgacgcgcgaaccactataggttcatagtagtgaccaatagtggttgactcgtgaaccactattggtttacccccgtaccactattggtttgcactacaagcgagtagtggtatgcattcgtttcttccacgagtatagaaagtaagcccctgacgtatggctatttacatgcatcagggggctctttctttgcacctttcttgtatgtatgtatgtatgtatgtatgtatgtatgtatgcatgtattttactaagtttgtggtagacaactgaatctgaagacatcgagtcaacgccacaaacgtcttaccataactcacgatacccttatgaagaagcaagcccttcatagtctattcgcctgtctctgtgagagcgctctcgcctcatgcggtagtcagcgagccctccacttcgatcacgacggagcaagggaaagtcccgcagtggatacgagcgacgtgcatcggctatgaggtattaaagttcccagtggcattaccatctctgaaattctaaatcacgtgtaagtatgaataagattatcctgtgtatagccttgttgctatgccaactacaagctattggtcagtctcagtctcgctatgactgcctatatgagtacaccgtcaaggcatccaatggtaaccgagaggtttattctacaatcctccaaattggaagcacttcggcactgttctcagactacctcgcatttcagctggactccctacgacagacgaagtctcctgatgaacaaatcaaaatgggtgaagcacgtctaaggaagtctgcttacttctttgaccaaactgtatttcagaacaccccgaaaggaaagctctcggtctatagcaccattatcccaaaccactatacttatcaagaggataaagtcaatatggtatgggagatagacgacagcagtactgatacaataagtggctattcctgtcgtaaagctacagcagagtatggtggtaggtcttgggtagcatggtatgctcctgatatccctctacagtttggaccttggaaatttacgagcttgccaggtctaatcctaaaggtttacgatagcgagcaagtacattgcttcgaagctattcagctaaggaaagcaaacttaaacatagtagaacctcagtatggagatgtaatctccactacccgtacaaaattcctcaaagcaaagaatagctttgaagagaatccaatggctaatcttccgccagaaagtatcgcagacatggtcgttatgaaaggagagtctgggggacgttctatactaatcaacggaatgcaattacgcctaagagaaaatggatatatcccgatagaaaaggagtgattatgaagccttggcctcgtctattgctgtctttcactcttgctgtagtctggagtatctcagtatctgctcagactttgctaagtggggttgttatggatgctagcaagaaccccatagagggtgctagcatccagctatctattgggcaaaaaaaaacagtagccatctctattacagatgagcgaggacaatttagtctctctacaaaaggccaggctgacagtctctatatcattgttagtcatatctcctttgaaaagaagagtataagactagaggcggaggcaaaagatatcacgataatcctctcacccaaacagacaatcctcaaggaagtgaccgtaaagactccctctttgactcaaagaggagacactcttacatatagcctacgggcattttcaggggagggagactacaggctgagggatgcacttaagaagctcccagggatagatgtcgcagaaagtggaaaaataaagtatcaaggaaaggagatatcaaacttctatatcgaaggtttagacctattgggcggtaaatataaccttgcaactaataatattccgtcgagctatgtgtcatcggtacaagtactaagcaatcactccgatgccaagattgataaagatgtactgaccgatgatgtggcacttaatataagtctaatcaagaaagccaaaattaaacctgtcgggagctatagccttgtggctggcattagagagagtgctctctatcaagcttctggttcgggtatgatattcaagcctcaagttcaagtcataggggtacttaaggcagggaatattcaagagtttgcaaacgataatactacagataatatagctggtgagaaggcttcaaccttagcatcaatgattgttggtgacatatcgggagttatccctcctatcaaacgcgagcgttatatattccctggggattatttgacaagccttagtactattggtaaactatccgaaaatgcaactttgagggctaatgtcggctatggcttctctcgaacacgctatgagtatggttacaacttggactttgtcgattcttctcgccccaatataactatacaacaacaaaccacaccaacagaacgaaggcatactccattccttgagatagaatacaagaataatggcgatagacgctatgtccagaataagttgtcggtaaaggcgagttgtcttagctcggatatagcagagacctcgccctctgtccttgggaattctggtctaaaaggtcgctatagggatattagtttctcagatgctctctctttacgttggcgaaagggcaatactcagtggggggtatcaagtttagttggttattcaactgcaccgacagcccagattatgctcttatcaaatgggctcgagcagctggcagctagtgaacagtttttatccaagatttctttattttcgtcctatgaagtaaagaggtctcgtataagcttccctatatccattcagtacaagagagacaagctctcaactcaatctatccatagcactatagtctctaatgctatcaataacttaaagggagataatcttcttctgtccttcatccctgaatacgagtacacgcatccattgcagaagtatgtatttcgagcgaggttggacctatcaagtgattatattaattatcgcaatatgggaacttggcaggctcaacataggaagacatattttagattcaacccctcgatttatttaagctacaagcttaatgctcagtccgacctcagagtgcaaggtgcatacactgagggggtgggtgcattaacagatttgctaacatccgcagtacagaataatattatctcggcaagtataggaagtggtatgcttgcacaaaataaaactctacatctaagtacagactatcgttttcggtcacctatagagatgtggtttttcaatacgggggtcacctatacctaccagcataggaatctgatatcatcccaaacgatatcttcaggtttggtaaacacttcttatatccctcaggacaatgggatcagtagcctaaatatatttgcctctctcaccaaacagattcaaagccttcacacaaaactctcattgacgagtatttacaatcatagtaatcagtcgatgatgcaaaatggggttatttatgagtatgaaggtggtagttttagtctgatgccatctgttgtctcaaagccactaaagttcattgagattaactatacgtatacactcaataaagggtttagtcggataaaaaacacgacacaatcattaagggcacatacacacgacatacacattgatttaaagcctatgcctaagtggagctttaagctcgccgccgagatgaactccaaagaaatatccccaggtcattgggcgaaactttgtatgttcgatattggacttactcacagcaataagtctctacgctatactcttgaactcaataatatcttcaatgaacaaagctataattactctgttttcagtgggataaatacctattcttactcttattcattaagaggacgcgagctgctattatcaattactctgacaatttaaagtcaagtgaaaaagattcggcttgtcaagcaatacgatgcaatgcaatgtggtgccgcttgcctaaccataatctgccatttctcttgaactatcatatatgcttgtttgatttcaaagtgctgttatatatatgaggacattgcgcaagatcaccttttcattgcacgtaccttcttccaccgaaaaatcggagtctttaggctgagatggctgagaagttcgggggaggaaagtgcaagctgtgaagagatggccttgcgcaatgggctcaatagtgtttcataccacgaccctatattggagcctgcagatatgctccgaaggatagctatataattcgtatctttgccactacttgtagccattgtatagatatggaaggtctacaagtaaatgttcactgtacaacaatgatgagaatcagccattccgttatatatcgactgagcttggctcttgctgtggttctcctttccggaggccttgaggcttttgcccaggtgctacgcaagccaacctttatggattatatccgcacttacgaagccgaggccagacgtcagatgagtcgtcatgcgatccctgccagtatcaccttggcccaagggcttgtagaaacgggtgctgggacgagcaccttggcccgagatcacaataaccacttcggtatcaagtgtcactcgacctggtcaggtaagcgtacctaccgacgagatgacaaccccaatgactgcttccgtagctacccttcggcgaaggagagctatgatgaccactcccaattcctcaaggcgcgtcgctatcagcgcctcttcgctcttcgctacgacgactatcgcggttgggctaagggcttgcagctctgtggatatgctacgaataagggctatgcaaatatgctgattaaggtcatcgaggactatgagctttatacctttgaccgaggcgagtatcccacgtggtactcaggtcgtcctgcgcctgctcgtcgtcctgcagaggcacagcgcagctatgacagacctatgcgcccctcctatatcagctatggcctcctctatgtgctcgctgaccagaacgatacctatgagcgtatcgcagcagacatggggatctccgcaaagaagctggctaagtacaatgatactcctgaggactatcctctcaatgagggagacgtcgtctaccttgagccaaagaataaggaggcttctgctcgctacactacctataccgtccgcgtaggggactcgatgcatgacatctcccagcgctatggtatccgacttgatcgactctacaaactcaataataaggatgctgactacgcccccgaggaaggggatgtgctccgcctccgctaaccttcactcggcaccagacccgacaaacttatgaacgagcgctatatgcagcgcggcgtctcagcctccaaggaggatgtgcatgctgccatccgcaacgtagacaagggcctttatcctaaggctttctgtaagatcatccccgatatcctcgggggagatgaagcctattgtaacatcatgcatgcagatggtgcgggcacgaagtcttcgctggcctacatctattggcgtgagacgggtgacctctctgtctggaagggtatagcacaggatgcgctgattatgaacattgacgacctgctgtgtgtgggggctgtcgatggcatcctcgtctcctcgacgattgggcgcaacaagcatctcatcccgggtgaggtcatcgctgcgatcatcaatggtacagaggagctccttgctgagcttcgtgctcaaggtattggtgtctatgccacgggtggtgagacggctgacgtcggtgacctcgtacgtacgatcatcgtagatagtacggtcacctgccgtatgaagcgcagtgatgtcatcgacaacgctcatattcaggctggtgatgtcattgttgggctggcttcctttgggcagtcctcgtatgagacctcctacaatggggggatggggagcaatgggctgacttctgctcgtcatgatgtgctggagcactcactctcaaagcgctaccctgagagctacgacgctgctacgcccgatgagttggtctacagtggctccaaggctcttaccgaacccatcgctggtacgccactggatgcgggtcgcctgatcctctctcctacgcgtacctatgctccgatcatcaaggcgatccttgatgagcttcgtcctgagatccatggtatggtacactgctcaggtggtgctcaaactaaggtgctacactttgtcgaaggcaagcacgtgatcaaggataatatgttcgctattccaccactcttcgagttgatccagaaggagagcggtacgccttgggcagagatgtacaaggtgtttaatatgggccatcgtatggagctctacgtctccgctgagcatgcagcccgtatcatcgagatctccgagagcttcggggtaccagcccagatcatcgggcgtgtcgaagctgcagagaagaatcacctcactatccactccccattcggagtgcttaactacgaataatagctactcaatagacctaaatggcaacggaaaacgacctgcttagccggatcgaaggcttggaaatacgcttccaagagatcacttcgcttatcaccgcaccagatatcatcgccgatcagaagcgcttcatgaagctcagcaaagagtatcgtgatctggagcgcatccttgataagggtaaggaatatcgtaacctcctcgggaatatccaggaggggcgcgatacgctggaggctgagagcgatccagagctccgtgctatggcgcgtgagatgatgcaggaggctgagcagcgtatcccttcgctcgaagaggagatcaagcttctcttgatccctgcggacccagaggatgcgaagaacgtcgttatggagatccgcggcggtacgggcggtgatgaagcggctctcttcgcaggtgacctctataagatgtatgtacgctactgcgaaggccgtggctggactactgaggtcacgagtatgagcgagggcactgctggtggctacaaggaaatcatcttcacggtcacgggagatggcgtctatgggatcctcaagtatgagagcggtgtgcaccgtgtgcagcgtgtcccagagactgagactcagggacgtgtgcatacctcagctgcttcggtagctgtgctcccagaagcagaagaagtagacgtcgtccttaatcctgctgatatcgagatgcagactgctcgctcaggtggtgctggtgggcagaacgtcaataaggtcgagactaaggtccagctgacccacaagcctacgggtatcgtcgtcgtctgtcagcaggcgcgtacgcagctggcaaaccgagagctcgctatgcagatgctccgtacgaagctctacgatatcgagcttaccaagcataatgaagagatcgcggcacgtcgtaagacgatggtctctacgggggaccgctcagccaagatccgtacctataactatcctcaggggcgtgtgaccgatcaccgcatcaatctcaccctctacaatctctccgctattatgtcgggagagatccaacccatcattgacgaacttatcatcgccgagaatatcgagcgaatgaaggaagccgccctctaacacatcatcattagtacaggttagaagggggctacctccttatttctaactccatagcataccgagattatgacaagagacgaactatttgagaacatcaagaggaagaagtccttcctctgtgtcgggctggatacggatgtccgtaagatccctcagttcctcctcgacgaggatgatcctatcttcgccttcaataagcggatcatcgatgccactgcgcacttgtgcgtagcctacaagcccaaccttgctttctacgaaagtatgggttccttcggcttgcaggcctttgagaagaccgttgcctatatccagtcagagtatcccgatcagttcatcatcgctgatgctaagcgtggtgatatcgggaatacgagcgatatgtatgcccgcagcttctttgagcacctcaaggtcgacgccctgactgtggctccctatatgggaagtgacagtgtcttgcccttcctcaagtatgctggacgctgggttatccttcttgctcttacctctaatgccggagcagtagacttccagatgcttcccgtcgatggcggtgaagaggccctctttgagcgcgtcttacgtaccagtaccgagtggggcaatagcgatcagctgatgtatgtcgtcggtgctactaaggctgatatgctggagcgtgtacgtgccatcgtacccgatgccttcctccttgtccctggcgttggctcgcagaacgggagccttgaggatgtagctcgctttggtctgaatagccagtgtggcctccttgtgaatgcctcacgtagcatcatctatgctgacaataccgaggcctttgccaatgcagcagctgctgaggctgaggctctacgtcgccagatggctgagatccttattaagaacaagcttatcgaggcctaagcccagtccgagacagaccgtatatgcagtttagtgcctcacagatagccccactcatctcaggcgtcatcgaaggtgatgcctccgtcctcgtttcgaacttcgggaagatcgagtcggctcagccaggagatcttgccttcttggctaaccctaagtacgaatcctttgcttacacgacgaaggcctcgatcctgctggtggcaaacacctttgctcccaagcagcctgttgcctcgacactcatccgagtagaggatccctacgctgccttagctcagctgatgcagctggtcgagcagcagagtgctcctcgtcttcaagggatttcgcccaaggctcatatcgctgatgatgtagagctgggtgaagatgtctatgtagctccctttgctgtcattgagcccggagctaagattggtcggggctgtcaggtccactccttcgcctatattggtcgtggtgtcacgcttggtgaggggacggtgatctatcctcaggttaccctctatcacggagtacaggtaggtgcgcgctgtatcatccatgcaggtgctgtacttggatcagatggcttcggttttgctcccgaatctgatggctatcataagataccgcagctgggtagcgtcttagtagaggatgatgtcgagatcggtgccaatacgtgtatcgaccgagctgttatggataatacggtcatccgtcgtggggtcaagctggacaatctcatccagatagctcacaactgtgaggtcggtgagcatactgtgatggcttcgcaggttggcttggctggctcctcggcagtggggaagtggtgtcgctttggaggtcaggtcggtatcggtggacacctcactattggtgatcgcgtagagatggcggggcagacaggcgtacttggcaatgtagcttcgggtacggctctcatgggctctcctgggatgccacttcgcgaggcgatgcgtagcttcgtcatccaacctaagcttcccgatatgtaccgccgcctacaggcacttgagaaagaacttgcagaactcaaacaacaactataagagcacgagtattatgactaagcaaaagacattaaaagctcccttctctctctctgggaagggcttacatacaggccttgatattcagatcactttcctccctgctcctgctgggacggggcgtgtcatccgtcgtgttgacctcgaaggcactcctgaaatccctgcactctctgagttcgtcaagggtacagagcgcggtactgtcttggtcaagggtgatgcctcggtaagtacggtagagcatgctatggcagccctctatgctaagggggtagataactgctacatcgaagtcaatgcgcctgagtttcctatccttgatgggagcgctcgtctctatgttgagggtattgatgccgctggtcttgaagagcaggaccttccagtagagcactacatcgtcaagcgtcgccaggaggtcgtatcggctgatggtcgctcacgtattgtcctgcttcccgatagtaagttcggtgtcgacgtacatatctcctttgattcgcccgtgctgagcaaccagtttgcttcactagaagacctcgctgacttcgacaaggagatcgcttcttgccgtacgttcgtcttcgtccgtgaagtagagatgcttctcgcaaataatctgatcaagggtggtgacctggacaatgcgcttgtcatctatgacgagccgatggctcaggagaacctcgacaagatatgtgatcttatgaaggtcacacgtcgtacggatctctcccttgggtatatcaataatgctcctatcatcttccccaatgagcctgcgcgccataagcttctcgatgtgcttggtgacctcgcgctcatcggtcgtcctatccgtggtcgtatcttggcttactgcccagggcataagatcaataatgagatgggagctaagatccgtaaggatattaagctcaacgaagctcaggctcctctctacgatcctaatgcgacacctattctcgatgtcaaccgtattcgtgaactcctcccacaccgctatcccttcctgatggtcgataagatcatcgagatcggtacggactatatcgtcggtgtcaagagtgtttcgggcaacgaacccttcttccagggacacttcccgacggagcctgtgatgcctggtgttctccaagtggaggcgatggcacaggtcggtggtctcctggtacttaatacgattgaagatcccgagaagtactcgacttacttcatgaagatcgacaacgtgaagttccgtcagaaggtcgtcccaggtgatacccttgtcttcaggctccgtctgctcggtgagatccgtcgtggtgtagccaacatgcgtggtcttgctttcgtcggcgagaagcttgtctgcgaggctgagttcatggcgcaggtcgcaaagaataagtaaatacatccacaagagcctgccactccttacctctaaatgagaggatagggtgtgtgcggctcttgtctatatacatatatgtctatgtcacatcctaacataagcccactggcgagcgttcattctgaagctaagctgggtgaaggtgttatcgtccatcccttcgccgtcatcgaagagaataccgagatcggggaaggttgtatcatcgagagtcatgccgtcatcaagagcggagctcgtctcggtaagcattgccatatccattcgggggcagtcatcgctggtatccctcaggacctcaagttcgtcggtgaagacagtgtcgctatcatcggtgatcacacgatggtgcgcgagtgcgtgacggtcaatcgtggtacagcttctcgcggtaagacggtcgtcgggagctactgcctcctgatggcttactcacatgtcgctcacgactgtgtccttggtgaccatgtcatcctcggtaatgctacccagctggctggtgaagtagaggtcgatgactatgctatcctcagcggtggctcactcgtccatcagttcgtgcgcatctctaagcacgttatgatccaagggggatctcgcgtgaacaaggatatcccaccctacacgctcattggtcgtgatcccatcgtctactgcggtatcaatatcgttgggctgcgtcgccgtggctttactaatgagcagatcttccgtatcaacgatatctaccgtacgctctaccagcgtgggctcaacaatagtgaggccttccgcgtcatcgaggaagagatccccgagagctacgagcgtagtcttatcctcgactttgtccgtacctcagagcgtggcatcgttcgcgggacgatggactaattgctgccaccaagtcaataggatatacttataagctttctctactctcatgcagaagatttattcgggcaagcagctggacatcctctatgctcaggctgctcagttggataagctaagtgcgcaggatcatatcgagcgtgctgctgtagcttttgagcgagagctcctacgccactattctctcggtggtcgctcgatttatgtctttgctggtgcaggtcgctgtggcgcctatgccttgagtattgctcagacactttcacgtagagggcatacggtcttcgcctacctcttctatcgtggagggaagctctcgcccgaatgtgaagctgttcgtgagcgcctcccaagggataccttccgcttggaagaggtatttacggacttcacacctcctaagatcgccagcggagacctgatcattgatgggctcttcggtgcagatctgcagacacctctctcagctggctatgtagggctggtgaaattcctcaatgaatccagtgctcctatcgtgagtattgagatcccttcagggctcttcgctgaggataattcggggaataagctggatagcgtcatctgtgcagagcgcacgatcgcttttgacagcccgaagctcgccttcttctttagagagaatgagccttatgtaggagcttggtcgtgcctttcgctggggattagtccgcaggcacagcatgggattgatacggcttattaccacgtgcaggatgttgcactctcgctggctctgcagaagcgtcctcgcttcagcatcgagcttccacgagagaaggcacttctcttgacttatgtgaaggggcatattgggaagacgctcctatctgctcgagctgctttccgtgcgggatgtagcgagcttcatgccttagtacctacagaggaagcactgtctctctctcttaccctgcctgagcttacagtccatacgccgtctgacgaggcgaaactgctcactggaatcaatgcttatcggacggtcgtcattggggagggctttggtacagatgaagaagcgctccatcttttagaaagtctgcttacgccttcgtattcgcgacctttcctcttggagggagatggcattgcactactctcaagtgatcgtaagctactgaagaagctcccgaagaatagtatcttgatcgcttcgcacctggagatggatgctatgttcggagacttccgctccgatcgtgagcgtctggagcgtgctctcgaactggctcgggaatgcgatatctatgtcatactgcgtggcacttactccgcagtatgtgctccgacgggaacggctttcttcgatacaacggggaataccggtctccaaactcaaggcgcttccaacgtcctcgctggtgtcatcgcagggcttctgggacaaggttaccagtcgatcacagcagctgtccttggacttcacttggtcgggctgtcggcagagctttatgccggccgctattcggagcgcagtctcacggcgacgagcttgatcgacctcctgggagaagcttatcatcagctcgaggctaagtaagctttctcttccgagtcatcggactccggatcataacataagaaagggcgtgatgctatctgcatcacgcccttctctatttgcgggtgaatggtcagcctttagtcaaggggatggaccatatcttcgggacgaacccacttgtcgaagtcttcttcgctgacatagccgagacgaagggcttcttccttgagggtagtaccgttgcggtgtgcagcgttagcgatctcagcagccttgtagtagccgatgtgggtattcagagccgtgacgagcatcagggagttattgagaagctccttgatacgtgggtggttgggctcgataccagatacgcagtggatatcgaaggatactgcagcatcaccgaggagctgtgcgctctgcaggaagttagctgccatgacaggcttgaagacattcagctcgaagtggccctgcataccgccgacagcgatagcagcatcgttcccgatcacctgagcgcagaccatcgtcatcgcttcgcactgggtaggattgaccttacctggcatgatagaagacccgggttcgttggcggggataatgatttcgccgataccgctacgaggacctgaagcgagaagacgaatatcattggcgatcttattgagcgaaacggcgatctgcttgagtgcgccgtgagcttctacgatagcatcgtgagaggcgagagcctcgaacttgttctgagctgtgacgaagggcaggccggtgaactctgcgatgtggcgagctactacgacatcatagcccttaggcgtattcagacccgtaccgacggcagtaccaccgagagcgagttcggagagatgaggaagggtattctccagtgcgcggatgccgaaagccagctgtgcagcgtagccactgaactcctgtccgagggtcagaggcgttgcgtccatgaggtgtgtacggccgatcttcacgacgtctgccatttccttggccttcttgtcgagggctttctggagctggcgaaggcctgggagggtcacttctactaccttcttgtagcaagcgatgtgcatgccggtggggaaggtgtcgttggatgactgagacttattgacgtcatcgttggggaggagcgtcttttcgccttcgccgatcttcttaccagcgagctggtgtgcgcgattagcgatgacttcgttgacgttcatattgctctgcgtacctgagcccgtctgccaaatcacgagagggaactggtcgtcgagcttgcctgcgaggatctcatcacagacagctgctatgaggtcacgcttctctacgggcagcacgccaagctcatggttggcgaaagcggcacccttcttgaggtaagcgaagccacggatgatgtcaagtggcatagatgcgggttgaccgatcttgaagttgttgcgagagcgttcggtctgcgctccccagagcttgtctgcaggcacctggacttcacccagggtgtctttttcgattctgtagtccatactatgattgtatcactaatgatgcgggggtgtctacagcgtggctatagactaagacaaaaatacaaatagatttctgtatttcctgcccgagagccgaatttgatggcacccgcgaaggctcctcttcgggcgggaaggaataaggctttgcgtcaggagtaaaatgcctttcagcgggaagtcattggcactcgcaagatgggtcatatagccctccacagaaagtaatataacttccgaccaaaagtaatataacattcgtcgaaaagtaatataacatttgaccgaaagtaatataacattcggcaggaagtagaggtacttcttccgagaagttaaggtacttccttttagaagtagaagtacttcctctgaaaagtagaggtatttcttccgaaaagtagaggtattttcattgaaaagtagaggtattttctggagcacctcaagacgcccttggacaaaggctctttgtgccccgtccgaatgagcttgaactgccccgacaaaatgaaggtagccccccaactccaagcggtgagttggggggctacttgcgctgagtcccgtcgggtgctgcagcgtttattagctcttgaaggtcttacttgtgaagccttctgcagggaatactccgtctaagacgaagtacgtcccgaacttgaatcggaagttatactcgccacgcttggagaaagaccaggtgaacttagtggtatcgatgccgtcccccgtgatccaggcagccgatgaagtgagttctgtcccgtatctcaggataaagaggtagtctgtagaggaaggatcgaactgagctgccttgagagcctgcgccacatcagcgtaggagaagtccttattggcatcaagcacgacgtcgaacggagcttgcccctcgaagatcgcaggcttcaggctgaccttactctgcttgatcgagcggtcatagtcttctgcgtccttcttgcgtggccccagaatggcgtaggtccagatgcaggccgcgggcgtcaggctattatagctcaggtcaagtgtctccagtgcggggtagctttcgccctcgacgaagacgctcttgatgctattattgggcacgcgaagactctcaagctgcttgagaccttcgatgcgcagcgtggaaagcttgccacgctggtcgtggtcttgagctgtagcaccgcgcttcagcccgatgatgaggacggactgcagggaagtgtaggggcgaagatcagcttcggcgagctcttcattcccgctgaggttgagcgattcgataccagaggggagcttgaccgaagccaaattcgtcagacggttgtgcgccaggctgacggtcttgaccgaagtgaaggccgagagatcgagcgaagcgatctcattctcctcaagagtgaggcgcttgagcgaaggaagggcggagagggtaggggcagttaccttcgtgccttcgatagtcagtgcgctgagctgcgagcattcgctgatctcagccttagtgatcccctcggcatgactgatgtcaaagaggctgagcttcggcagagcagagagctgaacggaggtagctgacgaggcttctatatgatgaagcgtcagatagcgtaggttggggaagtcctttgcggagaaattcaggttggcgaacttcgcatggctggccttgagtaagtcgagattcgtgaggccgctcaagctcacaccgccctgaagtgtcgtgtgaaggggctcgatgtagaggtccgtgatggcgggaaggcctgaaagctcgagcgaagaaagcttcggcaggcggtcaatagcttcgccggcggcatcgcgcatttctacagggagcttgaaggagccattatcatcgttggtggtggcgagcttggggaagtcctttatgacgacacgctcgagcgactcgagaagctcatagctgagctggctgagtgtggcggcctggctaccagctgtacccgtgaggctgagatcagtgagcttcggtaggtgctgcagctgtaccttctcgagcttgggggcaatgagggtgatatgtgtgagctcaggcaggagatccgtcgagaggaagtcgagggaagtgatgggcgagaagccctgcgtaccagtcagaagctggagaacgtggtacttgccgtcggtgcctttgatgaagttcaccgccagatgtgtctgcgtccacttcgtcgggtcgttggaggcgatgtcggcttcgaggccatttcgcgaaaagagcttacgaagcgtctccagctccgagggcacgatctcatcggtactactgggcagggtgagctgatagctgatagttggcatcacttgctcctgcttcttggtgtctggctcattgccgttctcctgcttacaggcggggagtccgaggcaaagtgctaaggccagactcgtgaggtaagtattggttcgtttcatccgtaggatagatatgtattgaggtaaaagagaccgctgcggagagtgcctccacagcggggctacaaaggtagatgaagtcctccctcggtgtctatatccgcaggaaaataccgatatgtggtgaccctaatgcctccaaaagcctccccttcctcccctcgaatgagtaggaagtacctctactctcggagcgaagtcgaggtacttccgagagctttctcaggtactttcgtctgcattcttaggtacttctgcctgcttcttcagcttcttcccaccgagagtaattggcaaaagatgggtgctctgcacaaaaagcgtatctttgtgctatatatcattaatggttatttaacagataaaggaatcacaactatgagctataatctcttagcaggaaagaaggggatcatcttcggtgctctcaacgaacagtccatcgcatggcgcgtcgcagaacgtgctgtagaagaaggtgcagaaatcatccttaccaacacggctgtggctgttcgtatgggtcagctgaatgagctgggccagaagctcaatgctaaggtcgtccccgctgacgctacgaaggaagaggaactcgaagtagtcttccaggaagctatgaagagcttcggcaaggttgacttcgtcctccactccatcggtatgagccccaacgtccgtaagggccgtgcttacgatgacctcgactataagatgctccagacgaccttcgatatctcggctgtatctttccacaagatgctgcaggtagctaagaagctcgacgctatcgcagaaggtggctctgtcgtcgctcttacttatatcgctgcacagcgtaccttcgtcggctataacgatatggctgatgccaagagcctcttagagtctatcgctcgtagcttcggttacatctacggtcgtgacaagggtgtccgtatcaataccgtctctcagtctcctacggtcacgactgctggtagcggtgtcaagggtatgtctggcctgctcgacttcgcagaagacctctctcctctgggtaacgccgacgctaacgactgcgcagactactgtatcacgctcttcagcgacctgacgcgcaagatcacgatgcagaatctcttcaacgatggtggcttcagctctatgggtatgagcgctgctgctatcgaagccttcgctacgggtcgcgcaaaccgcgagaagtagtccccacaaatcgaagaggctttatacagctttaggcaatgatacttcgcacagagaacctcgtcaagcgctatcgctcgcgtacggtcgtcaaccacgtctcgatacaagtcggacagggagagatcgtcgggctacttggccctaatggtgcagggaagacgacgaccttctatatgacggtcgggctggtcgtccccaatgaagggcgtatctatctcgatgaccaggatatcacgaagtatcccgtctaccgccgagcacaagcaggtatcggttatttggctcaagaagcttcgatctatcgtaagctcagcgtagaggacaatatcctctcggtgctggagctgacgaatcgaacgaagcaggagcagcaggcgcgtcttgaggagctcatcgctgagttccgattagaaaaggtacgaacgaacgctggtaaccgcctctcgggtggagagcgtcgtcgtgctgagatcgctcgctgtctggctattgacccgaagttcatcatgcttgacgagccgttcgctggtgtcgaccctatcgctgtgcaggatatccagagcatcgtagctcagcttcgccacaagaacatcggcatcctcatcactgaccacaacgtctacgagacgctcagtatcaccgaccgtgcctatctcctcttcgaggggaaggtgctcttcgaagggactgctgaggagttggccgagaatgagatcgtgcgtgagaagtacttgggtaaggacttccagctacgacgtcgtactttcgatatcgatacgacgaaggaatagccttcggcttcttcagaagtagaaaacgattagcccccgattccaagacattggatcgggggctaactgcttttatataccacccattttgagggctttgatttccctcccataggtctacttagccgacttcactatgggctacgaaacgaaccagtactgctccgcattgcgaccagtactggtaactaatatcgaccagtactgctcacgcttcggatcagtactggtcgcttcgctgaccagtactggttcgtttttcctcctctctgtgacgcacacaagtaagccctatatcgccagcttagatgctgctggtgatatagggcttgctttattagagaggggggagtcttacctcttgagaagcttctttcttagtgcgacgagggcacccttaggtacttcgtagcggtagacgatcccgatgaaaataagtagcaggagtgtattgactgccatgcgaagtatgggggcatcggggagggcttgtgcgatggcccattcagcagcgtagagtacgcctgtaaggagtgtgtatagtccaagtcgaggtaggtcgtaggccacggggtagtagtactggccgagggcgtaagagaagagcatcacgccaccattggctactactgatgcccatgcgcaggccatgaagccgtagcggggagccagcaggacgatgagtagtactgtcagtgcacagcctacgatcgagaggatagccccccagtgtgtgcggtcggtgaccttgtaccagagtgagagattgaagtacacgccgaacattaactgccctgccatgatccaaggcacgacagagagcccagggtaataggctggtgcgatgagaagcttcaagatatccatatagctcatcaccgccaggaagataaagagcgtgaagagcacatagtacgtcatcgacgaggagtaagctcggcgagcagcatcctcacccttcttcttctcggcgaagatgaaagggtcataagcgtagcggaaggcctgcgtgaagaggaccattacgacagccagcttgtagcatgctccgtagatacccagctgtgcattagcgtagtgggagtcctcaaagagtagagggaagagaatcttgtctgcttggttgttgaagttgcccgctaagcctaagaggagcattggcagggcatagcgaagcatggagcgaaggagcttgctgtcgaagcgtcccgtagccttacgcagggtggggaggagcaggagaaattgcagaccattgctcaccagattgatcccgaagatatactgcagtgcgtgctctctgggatggagttctccaaggatagggatgtactcactaagagcagggacgccgtagaaggcgaagagcgtcaggaggatggtcgccccgacgaagctcatacgcacggtcataaaccaccaagggcgctgctcatagcggaggtagcccagcggaatggccatgaaggcatcgctagcgacgatgatgaggagatagctcaggagatccttgtgctctgcgacgtggagcactgtcgctaagggatcgaggaagagccagccgagtagtacgaagagcgtggaggttaccccaagtgaccatagggtcgtcgaatagacgtcagcaggctgctcatgcttgttcgcaaagcggaagaatgctgtctccatcccataggtgaggatgatcatcaagatagcggtccaagcatagaggttagtcatctgtccgaattcctcggtgatgagtacgcggacgtagacgaaggtaaggagccagttcaggaagcgcccgaacatgctgctcaggccatagactgctgtatccttgattagtgaggtaagtgtactactcattgtggtggtcgtatgcccttagtaattgtcgtcatcgaagaagctccccgcttggcggatgcggggcttcctccccagatgactataagctaagtccgtggcttcacgaccacggggcgtgcgcttgatgaagccttccttgatgaggtagggttcgtagacttcctccaccgtgccaggatcttcgcccaatgcggtagcgatcgtcgtcagtcctacggggccaccagcgaacttatcgatgatcaccccgaggagcttattgtctatgtagtcaagcccatagcggtcgatgttcaaggcttcgagggcatagcaagcgatctccttggtgatacgcccatcgcccttgacttgggcgaagtcacgtacacggcggagtagcgcattagcgatacgtggcgtcccacggctacgggaagctacctcgactgcagcactgggtacgcagggcgtctgcaggatatccgccgagcgatggacgatgtctgcgagcgtctcgatgtcgtagtactccagatgcagattgataccgaagcgagcgcgcaggggggcggtcaagagcccactacgagtcgtggcgcccacgagtgtgaagggattgaggtcgatctgtatggagcgtgcgctgggacctttatccagcatgatgtcgatgcggtagtcctccatagccgagtagaggtattcctccacgatgggactcaggcggtggatctcatcgatgaagagcacgtcattgggctcaagtgaggtaagaagcccagctaagtccccaggcttatccagcactgggcctgaggtgatcttgataccgacaccgagttcggccgcgatgatgtgggatagggtagtctttccgaggcctggagggccgtagaggaggacgtgatccagtgcatcggagcgcatcttcgcagcctgtacgaagatcttgaggttctctaccgccttgtcctgcccacggaaagtgtcgaaggagagagggcggagtgcacgatcgatatcttgctcttctgtggagagcgtagactgatcacgtatgtcgaagctatcgagatccggcatgaggctatggatgtgatgtggagtgaagtgagtcgaggaatgtgaagagcgtgcggtagaccgtggcgtaagcggtggagtcactcgagagaaaaaggtcgtggaggccgttggggatgcggtgtgcctcgacttgagggccaagcttcttcccgtagcgctgtatatcctctacgtccagcacgaggtcagccttaccgaaggcttcttgccatacgcccttagcgcggatactcttatctgagctcatcaggaggataggcatcgggagttgtagaccacgctgcacgcgcttatgcccacgacgaatagcacgaagccaaccgaggcggatggggtgtccgtagtccttcttgagatgcgtgtcgtagtcccatggcccgtggtatcgggagagtaatgactgagcatataggtcgggcgacttagataccccactgatgaccttgcttggagctatacccgctgaagcggtcagtaggggaaggacgatcttctcctcagccttcgagaagttgaagtcaaagaaaggactattgaggatgaaggcacggatgctatcttgattcttcgtgtcagcaagataaagggaggtgatgagcccacctgtcgagtgtgccatcagatagacctcctcggcaccttcctcacggatgatcttcagtgctgcccccagttcttcatagtactcccgtaggtctcgtacctcgaaggcatcttgatgagggaggatagagcgcccatatttgcgtagatcgagagcatagaagtcaatcccatgctgagcgatactatctcccatagcggcctggaagaagtaatcattgtatccgtgtacgtagagtagggcccgcttagagggagtagtacggtcgtgtcgtatgagtgtagcggtgacagctcctgcgtagtcatctcgcatctgtagtgtgcgctggctgtagcctgagatgctatcagcacgccattgtgcggagagctccagaccaagtagactgcacgtgatgagaaggaggaggatataaagtcgtcgtttcatactatctgtttgtattgacttgaatgcaaagataacttaaatcacgccatcccgtggcggtaggtcctgtcggagtatgggctttgcgctaaaataaagcgagctatccagcctctgctggacagctcgctatgggagtgatgtgcacttctttagaccggtggttacgccttcttgttgatgaagatgtgaccgagaaagccgaggacgacgagtgtaagccccgtgccgaggaagaggttggcattctctacctggtccgtgaagtaagtgaagagctgaagaagagccccgatgagcatcacgatgataccgatatactgcttcataatgtctctatgtactatggttatgtgtatgttctctatatgcaaagtacgcaataattccgtacataacgaaacgcttacagaagatagcccccgataccccatctctgtggagatatcagggggctactcttgtgaaattgcgactctgtgaaggggagggctcaagcctcctctattagatgctaattagcgaggacgacgctcaccacggtcagggcggggacgacgctcgggctccttatagccttcgggcttgggaagcagggcacgacggctgagcttgaacttacccgtcttctggtcgatgtcgatgagcttgacttcgatctgctgaccttcttcgaggcccgtgtcttcgatcttttcgtagcgcttccagtcgatctcagagatgtggagcagaccgtccttaccggggaggaactctacgaagcagccgtaaggcatgaccgaggagatcttaccctgatagacttcgcctacctcaggcatagcgacgatgcccttgatgaggccaacagccgtgtcgatagcatccttgttggatgcgctgatttcgactacgccgacgccatccacttcttcgatgctgatagaggcaccgctcttctcctgcataccctgaatgatcttaccaccagggccgatgacagcaccgatgaattccttgccgatacgcagggtcacgatgcgaggagcatggggcttgaggtcttcgcgagtctcgggctgagcttcgagaatcttgccgaggatgtgcagacgaccttcgcgagcctgtgccagagcacgctcgaggatttcgtagctaagaccatcgaccttgatgtccatctgagtagcggtgataccgtcagcggtacccgttaccttgaagtccatatcaccgaggtggtcttcgtcaccgaggatgtcggagaggatcgcgtagttcgtacccttgttctcagagatcagacccatggcgatacccgatacgggcttagcgatgggcacaccagcgtcacgcagagcgagcgtaccagcacataccgtagccatagaagaagagccgttagactcgaggatatcggagacgacacggactacgtaggggtactgagcggggagcatgcgcttgagggcgcggtgagcgaggttcccatgaccgatctcacggcggccgacaccacgctgtgggcgagcgtcaccggtagagaagggagggaagttatagtggaggaggaagcgttccttaccgtagttaagtacgtcgtcgacgagcttctcatcgctcttcgtacccagcgtgaccgtcgtcagagactgcgtctcaccacgggtgaagactgcagagccgtgaggtccgggcaggtaatccgtttcgatccagataggacggatctcggtggtcttacgaccgtcaaggcgcttgccttcgtcgaggatagcacggcgcatagcttccttctcgacgtcgtggtagtaacgagcgatgaggggagccttcgtctcgagctcctcttcagtgaacttagccttgtattcctctacgatagcatcgaaggcctcagcacgagcgtgcttgtcggtgcccgatacagctacggcataggccttagcatagcaggattcgtgtacatccttgcgcaggtcttcgtcgttctcttcgtggcaataggtgcgcttgacgagcttacctacagcttcgctgagctcgagctgagcctggcattgtaccttaatggcttcgtgggctaccttgatagcctcgagcatttcagcttcctggacttcctgcatttccccttcgaccatcatgatgttatcgagggtagcccctaccatgagctcgatatcagcagactcaagctgctcgaaggtggggttgatgatgaattcgccattgacgcgggcgacgcggacctcactgataggaccgttgaaggggatgtccgatacggcgagggctgcagaagcagcgagcccagccagagcatcaggcatatctacaccatccgtagagaagagaatgacattgacgaagacttcggcatggtagtcatctgggaagagggggcgcagggcacggtctacgagacggcaagtaaggatttcatagtcagaagccttgccttcgcggcgcgtgaagccaccagggaagcgaccgaaagcggcatacttctccttgtactcgacctggaggggcataaagtcaaccccaggattggcatccttggctgcgcatacagtggccagcaggacggtattccccatacggagggttacggaaccgtcagcctgcttggctaatttccctgtctcgatgacgatctctctaccatcgggcagtgtgattgttttgctaattggctgtagcattattgttctttaattgattgataacacctttaatagtcgggacaaaggtagtcaaataaacggtaccaagcgccccagctctgcgatgtagccatactttggagggaattcttatctgctaccttcctgcttacctttattcagctcctcgaggtcgggcaattttgccataacggaaggggatccagtatgccatggaggctctttatgagcttgatcaaagaagactcatctgctgctcaacttcggctgtcgtataggcctatgatatgaacccatattggtcgctgctctgacctatattggtctacactccgagctatattggttcgcgctcggaccaatataggttcactcgtggaccaatataggtttataccccttacctctattgcttgggaggactccctccaagagtcggtcattcatccctcccgttcatcccgcttggaggtaatggtagttgcttctctcaaacgaaatcccccgcttagagttcggcttctaagcgggggctattctatgctaatagtcgtggtgaatgaaagaactattcctcgtcctttcctgcgaactccatcaagtaggccttgatgaactcgtcgatatctccgtccatgacagcggtgacatttgaggtctggtagcctgtgcggtggtccttcacacggcgatcatcgaagacgtagctgcggatctgggcaccccattcgattttcttcttaccagcctcgacctcggcctgcgccttgcggcgacgctcaagctccttgtcatagagctgcgagcgtagaaggcgaagggcattctctcggttgtcagtctgcgatcgggtctcagtattctcgatgatgatctcctcttcctcgcccgtgtcggggtccttgtacttatatcgtaggcgtaccccagtctcgaccttgttgacgttctgcccaccggcaccactggagcggaaggtgtcccaactcatattggcgggattgacctctacctcgatggtatcgtctaccagaggtacgacgaagacggaggcaaagctcgtcatacgcttcccctgcgcattgtagggggagatacgtacgaggcggtgtacgcccgtctcgctcttgaggaagccataagcctgatcaccctcgacctgcatagtcatggtcttgatgccagcttcatcgccgtcctgccagttggtgattgtggtcttatacccttgcttgtcgcaccagcggctatacatacgggcaagcattgaagcccagtcttggctctcggtaccgccagctccagcgttgatcttgagtacggctccaaggttgtcttcctcggcacggagcatattcttaagctcgacctcttcgaagaggtaaatggcacgcccgtaggcatcatcaacttcctcctcggtcgtgatctcctccttataatactcaagtgcgagggctacctcctcgacgagacgctcagcttcgtcgtagtaggcgatccacttgcgaaggtccttgaccttacgcatctgggcttcggcgcgggtgcgatcttcccagaaggaagggtctgccgtacgaagctcttcttcttctaattggatacgtcggctatcgacgtcaaagatacctcctcagcgcagtcttgcgctccagcagggcattgagctggtctgtcgttatcatagacttctatgtgattagtgaataaatagtcgggggtatgttaggcctccttctcctccagctcgagctggcgcagagtaagtaggtccatctcttcgatgagctcaccgatacgctccgaggccttcatcagctcttcgtgtgagagtgtgcctgtggagagcttggcctcgagggatgtcttctcctcatcaagctggggaatacgcgctgtgatctcctcaagctctcgtcgctcagcataggtgaggcgtgcagggcggtttgctgtgcgacgtgattctgctggctggggggctgctttacggggctgtgaagcctcagccttttgacgctcttcctcctcacgcttcatacgatagagggtgtagctcccagggaagtcacgtacgacgcctgccccctcaaaggaaaagagatggttcacgaccttgtccatgaagaagcggtcgtggctgacaatgagtacgcagcctgcgaagtccgcgaggtactcctcgagtgcttgtagggtgaggatgtcaaggtcattggtaggctcgtcgaggacgaggaagttcgggcacgtgacgagcacggtgcacagatagagtctgcgtagctcgccaccgctgagcttctcaacaggggtgtattggcgctcgggagggaagaggaagcgcgtaagtatctgggaggcggagaggcgctctacttgggcgcttcctgcgggaagctcaaagttctctgcgatctcctgcacgatgtcgatgacgcgcttctcgggcgagaaggtcggaggctcttggctgtagtagccgaagcgtatagtctctccgatgtcgaagtgccctgagtcaggctcgatctcgccgaggagcatacggaggaaggtggtcttaccgacaccgttctcgccgatgataccgaccttgtcatagcgactgaagacgtagttgaagtcctgcaggagtaccttgtcgccaaagcgcttattgacgtggtgtgcctcgaagatcttcttcccgatgcgggtcgatgaggcgccgagctgtacttcgtccgtgcgctgagcagggcgggtcttagcctctaactcatggaaggcatcgatgcggtactgtgccttcgtcccgcgagcttggggctgacggcgcatccactcgagctctcgtctgtagaggttgagtgcgcgctgacgagactgctcctcctgctcgtgacgctcttcgcgcttggtgaggtagtagtcgtagttccccttatagcggtagagacgcccaccatcgagctcgatgatctggttgcagacgcggtcgaggaagtagcggtcgtgggtgatgagtaagaaacccatcgtggagcgggcgaggtagctctcgagccactcgatgctcttgaggtcaagatggttcgtcggctcatcgaggaagaggaggtcgggctggctgatgagcgtactcccgagggcgatgcgcttagcctctccacccgagaggcccttgacggagcgctggtagtcgtggatgccgagtgcacccaggatctccttagcacgctgctcatagtgccatgctcccttggcctccatctcggggaggaggcgctccatcgtctggctatctcccgactctacggctatctcccaagcgagggtgagctgtgctacgggatcgtaagggctgaagcacgcttcgagtatagtccccgtctcggggagatcggggagctgtggtaggaaggcttgcttgatgtcacgctcgtaggtgatggtccccgagtcttgtggctctctgccgagcaggatacgcatgagggtggacttacccgtaccattgggtgcgataagcccgaccttctgcccacgctcaatggagaaggagatatcagagaagaggacgcgatccccgaagctcttggtgagttgctcgacctgaagcatacttagtctaaggattcaggggccatggggacacccttccagtgctccttgacttcgggtagacggccagcgcctacatagcgtgaggtgtagtaggcgttgttgttgaggttctcgatgacgataccacggctacagctgctgtgcatcatcttgatgttgccatcctcattgctgatgaccatagccacatgacctacacggttggcactgcggttacgccccttgaagaagagaaggtcaccgggctgaggatccttgatattattcgcatagacggcgagaccactcgaggagcgagggatcttgatgccttcgagagaatagatgtagctgacgaagcctgagcagtcgaggggccacttagcgacgcctgaggtgcgatagcgtagacctaagagctgctgcccgtggtctacgacggacttgatgagagcgggggtggaggaggctatctccatcttatcgtaggagaagccactgccgccactgcgacggcgatagtgtgagccatagctgcgactccttcctgcagcgtatcgtctgctggagcgcttatgtcttgattttctgggggcgggagctggtgcgggggcttgtagctcagtggtgagctctaagagtgaagcctccgtgtgctgggtgtgtgtctctgtggtcagagctccgtcgcgggtggagctgaggtcggtggctcctgcgggtagggcaaggagggtagtgagggctgctactacgagtgtagtgcatgacttcttgaatcgaatcatcctgtcttaacttaggtgaggcaggctatctcccccgtgtgggaaggaccttaaacacccgaggtggagggagtcagtactttactttgactccctccacttcggatgggctgtaggcaaaagatgtctacaagcagagaacgctttcgttagcaaagatagtataatctgctgaaatagactttgttcgctgcttgaggtgcgtggagaagtgccctatcggcgcttgctgatgatgatggagaagtaggggaactcccgctggagaatctcatccgtagaggaggtgatgtactccttcggcatgcctacgaactcgaagtaatgccacttgcgatcggagtgctgggcgacggctgacttgatctccgcttcgcagagcgaacccttcattacgacgatggtatgacggctctgccaagcgcggtcccactcctcacgagtagcttcgcctgggatgacagtacactgctcctcgagctgcacgagctgaccaccgagccggccattgcaggcgatgaaggcggggacaccgcagatctgctctgtggtgaagccctcttgctcgatatgctccccgatataggcggaggaggagtagaagccacagtcaccctcagcgacgatggcgatacgggcattgggctcggccttctgcttctcgcaggcctctcgagcgacgatctcataggcctcaagggcaccatcgcggtccttgctcatcgggaggtcgtagagttggatctgctcctcgcgtatgcctagtgagagcatcatctcggcggccttcgaggcatggcgtcccttgcgagagacagggacgggcgtgtagatatagtcggcctcgcgtagggtgcgaagggccttgagggtgatgagctctggatctccagggcccagcgatacgaagtgaatcatagttggggtaatgggttgctattgtctgtaagtaatccagcgccatacctcacgcatcgatggcttcttgccatacatgaggatgccggtacgataaatcttccctgcgagggcactcgtcaggaagacggtgatatatagtatagcgaggcttagaaggggctgccagagaggtacatcgtaaggcagtcgtaccatcatcaccacgggggacgttaaggggcagaatgaagcccagaaggcgagggtgccatcgggattgtctacactccccatacctgcatacatagagaggatgaggaggaggacgacaggcatcatcatctgtgatgcctcttcatccgagcttaccagcgaactcagtgctgcgaggatggatgcatagaagaggtagccacccacgaagaagaggatgaagaatatcagaatctttgagaagttcacaccctgcagtacagcgaagaaggtcgtggcctggctaaggaatgaagttcctcctatggcttctgattggaagaaagcctgggcgatctgtgctcctacaaagaacaagatggcccaaatggcgatctgtacgatacctaagagacctatcccgatgatcttgcccagcataagctcttgagggcgtaccgaggagatgatgacctcgacgatacgattctttttctcctccaggacaccctgtagcaccatgcctccataggtcatcatgaagaggtaactgaagaatgaaagggctacgccgatgatgctggctacagtactggacgacgcatcgacatcaccagattcgccccacttatatgtggggacgcggagctggacttggctctcctgtatagcttcttgtagctgggggatgttgtacgagcggatcttctcctcggtgaggtagcgggagagcacctcattgatataagtttccagcccttgtggtagctgcttgaaagagaagaggctgatagctttcgggtccttcaagagatcgtctcggatctcgagtatagcggtaatggactcttgggaggcctcgctgcgtaggctgtctaagggacggtccgaattgacgaagctatagctgccattgtcttggaagagggctgcatagcgacccgtatggtcgaggatagccacctgctgctggtccacctcattgacagaggatactaagacgggtacaaagccaatgaagagcatcaggagaggcatgacgaaggtcatcacccagaaggacttcttgcggaggcgcgtggtgaattcgcgctcgatgacgaggtgtagcttattcatacccgatactatttagcttggactgtttcgaggaagatctcatgcattgaggggtattccagctcgacactctggagctggatggtagaggggagctgggcgatgatcgagcgaagctcctcatcgggctgcagctgtactcgcaggatcttggagtactcgcgctcttcatgctccagtatattcagacgagataggtcagtaggggagatctcgccctcatagacgacacgtgcggtatgagagccgtgtgctcggcgtatctcagctgtctgacccgagaggacgacttcggcacggttgatgagcgtgatgtcatcacagagctcctcgacgctctgcatattgtgggtggagagcatgagggtcgttcccttggccttgagggcaaggatctcacgcttgagtacctcggcatttacggggtcaaagccactgaatggctcatcgaagatcagcaggcggggctcatgcacgacggtcgtgacgaactggaccttctgctgcatccccttcgagagctcttcgacgcgcttgtcccaccatgatgtgatctccagacgctcaaaccattccttgactcgctgctgagcatctgccttgctgagccccttgaggcgtgctaagtaaatggcctgttcgccgaccttcatcttggggtagagaccacgctcctcggggaggtatccgatatggaagaggtcttcctctcgcagggggcgaccttcgagacgcacctctccactgtcgggggctgtgatacgattgatgacacggatgagcgaactcttgcctgcaccattcggccctaatagcccgaagatgcgtccttcatgggcactcagcgagacctcattgagggcggtatgctcgctgtagcgcttcgtcacgtgatctacttctaagtatgccatagtatactgggttgtgtgtaagaggagaggagctttgaatcctcgaggctccatggtccgatagcaaagatacgatatggagcgaaagcttgaacagaggcatcttctccactcaagctttgctttttgcacgctactcctgcttcctagcagaggagcctaagtttattctaggtcctcgtctgggaatagagagtaggtctctttagggtgcttagagtcctttgattttttctttccaatttgcaaaggtgattcaattgttggtgatgtgagcttttttatatcagcttgcgattggatagacttattgaacttctcttgaaaatccttccagttatcagacacctccataattgctatgactcgctgtatctggttagataagtgggggttacctatgtcttctgttagatgctggtgataacgttccgttgtattacctcgctctgatctaggcgttatgcgtttaagctcatcaagtactccctcaggtagttgctcgtatataagtttgttagtccatttaccgacaacaccaggtcttttttttatgccttgtagggtataatcccagccatgaagacggaatagttgctgatagaatgcatcaggaaacttcttttgccaggggagaagggcctccgaaacgtaagccttaagtaacttttgaagttcatcccgctctctggtatactgataccccgtagcctcatcaacaagcgctgtgataccaacgtctgctagtgcgtagagtaaagcatccgcagttacagcaaagcgctcttggtttggttgtagtgcgccagctcgttttgcatctatgtatactttgcaaagccctcgcagtatacgagcatcataaccggtttttgtgcttccagataggggctggtattcaataagtttagtccattctttaatgtcttcacttatgaatggttgcaggttatttgcattgatgaagctaggcatttgcttagccctatatacttcgctagatgcgccttttcgaggtcgatcaaatgcttgaaagatagcagtggcagtgagtactcgcgtaccattacttagtactgcacaggaaaattccttatctccaatctttaaaatcccttcatgcgtagcttttatacttctcatgtgtttgcctttaaaggtggtgtaatattggcttattagacaaattcggtccgctctctgtgaggtatgaagaagatttctattctcttttagtggtagtggatgtttccgtatgaaatgacccatatttcatgtttgctatcacattgttgcttgctctcagaaagctttcaaaaggcaaagtaacaataaatagttgataagtatagctggaagtgtcaaatgtcaaggccgacgcaaagtggtagcgtgagcccctcactccaatacgaggatttttcttatccagcagaggaaagaatggtctttctgtgaataaagcgcagccgcctgcagtggttttcctccgtccacgtacatagtcttaaagaccacgtacgcaaatcctaatgtccacgcacgtagatattagagccacgtacgtagatcgaacttatcagctattcgtccgcaactcattctcgtacgcataggaggtcataccactacagcttccagcttttcactccgaaggaatgatcttcttacagccccaatagggggcagggatttcgatgcggtagcttcatccacctattcttatcagtgattagcgcgctaataattcgtatttttgtaagaatagttaagcgtcctttgcgaggggtataagcccctccttcgccccgtatattgcctattactcagcttcgatggcccgtaaactaaataagaagacttctcccaccacacccgccgaccgccaagatacggccgagcatatcctcctgcaccacgtacgtgtcaataatctcaaggatatagacctcgagattccccgcgggcagcttgtcgtcgtcacaggcgtgagtggctcggggaagagttcgctggccttcgatacactctatgccgaggggcagcgccgctatgtagagagcctctcctcgtatgcgcgtcagttcgtcgggcgtatggcaaagcccgaggccgactggatacgtggtctgccacccgcgatcgctatcgagcagcgtgtcgtcagccgtaacccccgctctaccgtagctacctcgacggagatctacgaatatctccgtctgctctatgctcgcgtagggcatacaatctcccccacgacaggagaagaggtgcgcaagcatacggtgaaggacgtcttggcctacatcaagtcgctccccataggtagccgcgtctatctcatcgtccctctgcatatcccctcagggcgctcactcgcggctcatctggagatccagctgcagcaggggtatagtcgtctctggacggaagacggcatcgtagctattgaggatgcgctgctgtggaaggatgatcgtgccgaagggctttacctgctcattgaccgcttggctctcagtgaagagctggaggccgtggatcgccttggcgaatccgtagagaccgctttcttcgaggggcgaggcatctgctctctggctatcgaggagatgaaggatggagtgcgccaacccgtgcgcttgcaggagttcagcaatatcttcgaggctgacgggcgagtcttccaagagcccagccccgagatgttcagcttcaacaatcctatcggcgcttgccccgagtgcgaaggcttcgggaaggtcgtgggtattgaccaccgcttagtaattcccgaccctacactctcggtctatgatgatgccgtcgcctgctggcgtggggtcgtctcgtcggagtggaagcagttcttcattcgctatgcagagaagctacacttccccatccatcgcccctatgaggagctgactgaggagcagaagacccagctgtgggagggcgtcccgtcgaaggagtatggtcctatcgggatcactccctactttgactatctgcgtagccagctccataagattcagaatcgcgtgcgtatcgcgcacttcacggggaagacggtctgcccctcttgccgtggtggccgactcaagcccgatgctctttgtgtccaggtcggagggaagaatatctccgaggtcgtctcgatgacgctctgggaagcccgtgacttctttgataatctccagctccccgagggagacgctttcatagcaaagcgcctactgcatgagatccgctctcgcttgaccttcctcgatgaggtcggcttgggttatctgacccttgaccgactctccagcaccctctccggtggagagagccagcgagtgaccctcgcgacgcagctcggaagtagcctcgtaggctcgctctacgtcttggacgaaccgagtatcggtctgcaccagcgtgatactgagcgcctcatccgtgtcgtccatcgcttgagagacttggggaacacggttgtcgtcgtcgagcatgatgaggagatgatgcgtgctgccgactacatcatcgacatcggccccgatgctgggcgctatggtggtgaggtcgtctatgctggacctgcctccgaaataacgaaggaaacaccaggctatacggctgcttacctcacggggcgtgagaccattcctctgccctcggtgcgccgtccatggaatagctatatcgaggtcgagggtgcgacgatgcacaacctcaaggatctcactgtgcgcttccccctacatacactcactgtcgtcagtggggtcagtggctcggggaagagtaccctgatgcgtgagctcttctacgaaggtgtctctcgcttgctgaacaaggagccgatggacaacctcgagcttcgtggcatctcgggagacctgagtgccatcagccagatcgagtacgttgaccagaataatatcggccgtagctcccgctccaaccccgtcacttacgtcggcgcctttgatacgattcgtgagctgtacgcaggccttcccctctcgaagcagatgggcttcaagccctattacttctccttcaataaggaaggcggacgatgcgagacgtgccagggggcaggcgtcatcaccattgagatgcagttcatggcggacatcaccttgccctgtgaagcttgtcgtggcttgcgcttccgcaaggagctcttggaagccgagtactgcggtgtgaatatctcccagctcctggatatgagcgtcgatgaggcggttgagttcttcgaggcgaatagtgcgtcctccaagctgacgtcgaagatcatcgatcagctccgtcctctgcagcgtgtaggcttaggctatatcaagctggggcagtcgggctctacgctctctggtggggagaaccagcgtgtcaagcttgcttactatctcgggaaggggaagaagctccccacgctcttcatcttcgacgaaccgacgacagggctacacttccacgatatccgtaccctgctggatgctctgcaggctctcattgatcaggggcactcggtgatcgtcgtcgagcacaaccttgaggtcatccaagctgccgactgggtcatcgatatgggccctgagggtggtaaggcggggggctacatcgtcgccgaaggcacacccgaggaggtcgcctcttgcgcagagtccgctacggggatgtatctcaaggaacttctcaagcagaaggtgaagcaacacactcgcaagaagtagcgctctgctccgtaaagacaaagaaaaggctcgccccctatctcaggtcaccgcatgggtgcctcagatagggggcgagactttatggatatgtgattacttagagcttgccgcccatagatctcgcaagcttttcgagagtatcctcggcatcctctcggggtacattggtattaatgcagttccccttggggtcgaagagaattaggcgagggatatacttgaccccgtctacacgctgatacttatcgaggaatacttgaggccacaggatagcttggcgctctgcttcgttgcagagggcagcatagtcatcgttcatgcctacgcctacgatctgcagtccctgccggccgtaggtgatgtagtatgctcggagctcagccatctcttctctgcaaggaggacaccatgaggcccagaagtgcacgagggtatagtgccccttgccgaggtagtcacggagtgcggcgggctgtcccttcatgtccgttcctcgtagcatatagatggctggatcaagatctgagcctggaggggtggcattcttttgaatgcgctgcagatgttccttgacttcctcatcttgtgtaagcctcttggagacctgagatacaagattcttggtcgcttgagtatcgtcgtctatcgtgcgtagtgcggctcggagacagaagagtcctacggcatcgtcgggatgctccttgagctgggacgcatagacagctgccaacgaggcatcgtagtcggagagcaggctgtcggccagcatggcgaactccagctgggagatactcttgtctctgctcaatgtacgctccttctcctcccggcgcttaagcagctcattcttcttgtccatcagttgggcgaacttatcattgagaggagtgcctaaggccacctcgcgctcaaaggatatcttgagtgcacctggctctgggaagagatagacgcgactgcctgcatcggtgcatagctcatagtaaggctcactggtcgggaggcgtaggaccttctcaaagcgacgcgccttgagaggtacgctatctatgacaactccatcagagacgcgtatgaggcgcatctgctggtctttatcgaactctgtggcttctcccgtgatcttgagttcgatgatctcgctttgctgtgcaaggagatgctgaggaatgaatgtgagtagaagaagggcggagtagagtagtagtcttgtcatcatatatcggtatctaacgtggtaggtgtgaggtgtgcttcatgcaggggtatatagcagaagcccccagctacgtctccgaagagatatagctgggggcttctgcttagaggtctggtgccaagcgcttagagcttgccgccattatcctggagtgccttgtcgaggagcttattgatctcctcaccacggaggtcacgagcgacgatcttacctgcgggatcgaagaggatgatctgaggaatccctgcgatgccataaagctctgtagcttcggtcttattgaagatctgaggccaagtgatctcaagttccttcatagccttgaggtgatcttccatctcatcccatacgaccgtaccgaggatgacgagccccttgtcggtgtaagcatcgcgcaccttcttcaggtgagcgatctcacgacggcaaggaccgcaccatgaagcccagaagtcaacgaggacatagtgacccttgcccacgtagtcgctaaggcgaacggccttgttagcgtcatctactccctcgaagtctacgaactgtgcacctgcctgcgtagcttctacacggcgaagacgtgcgaccatcttcgtaatgctttcttctgcacggaggcgatcaccagcctgctgcaggagtgcttctgccttagcgacgttcacgtcttccatcccgaggagggtctgaagagcaatgagaccgatagcatcgttggagtgctccttgaggtcagcttcggcgaggggcttgatcttgccgtagaattcattgacgatcttctcttgggcttcttccttggccttgtcgtccaggttcttgtctgcacggatagccttgagccgtcctctggtctctgtctcgagggcttcgcgtgccttggccttctgtgcgtgcaggtcattcagtgccgtccctgtagcagcgatcgcagcgaggtcagccttgatgatcccttcttcggggatgaaggagaggttgtacgatctggggatgaccagatgtgcgatgagaccgtcttcggctacagcacgctccagcgtgaatcggccattggcgatctggacgctatccgaagcaccctgaccgctgggcttatagaggtagacccactgaccattggcatctgcgggagcgatcccatcgatacggtagttaccagccttaggctgcgtgatggtgaccttagttacctttcccttggcggggcgcttacgttgagctacggcgggtagggcgacagtcgtagccagggcaaagagcccgaggcgtatccattgatttgtcttcatatacttgagatttgtcttgtattacagggaatgattttgctcttatccttaggctaagatagcgataatcctgctatgtacggagggtgcctccacagggatgtgtactgattttgctatcggcggaccttgacaatgagcttactgatgggacttccgtccccgatgaagggagcatgaccatcctcggggaagaggatgacgaagtctcctgggagcaagtcgacgtagctcgtcggctgatcatggtagaagatgatgtccttcgactcatcatagggggcacgggggctaaggcatttagcacgggggagccagccgatgcgctcgcggccctcaaggaggacctggatgtcgatgtaggattcgtgcgcttcgatcggctgctcatcttggggattggatggggcgtctattcggttgatgaagagttcttcgcctcggagctccaagcgctggggctccatagcccgtaggtcgtgactcttgatgtagtcgaagacctccttaaagcgaggatgaagggactcgtagcaagcggactcgtcgagggtactgtggatcatagggtgattaataatgtatgtgttgttgcttggcgtgtggtcttatcccgcgtggggagtgggagctcgcgtcatcaagctcatagcaaaggtagaaacttcccgttacttcatcaagcgccgtttgtgtctgatttgggggaagcctacctcctatttctcgtacagaaggctcgtagaaggctggacgtgcttccgtccgaaagggcagaaggtagggatgctggacagaacgtatacccttgctgagtgcaacgtatagctatcgcgggcaaaacgtatacgtttggcgatgaaaacgtatacgtttcgagcgtgaaacgtatacgtcttggtcatgaaacgtatacgttttgatcagggaacgtatacgtcctcttaccgcaggcctttccctttataaatgcatggtgctcggaaagtatagaggcattgcccctaagctctcgccagcccctactcaagataaagccacccgacgtgatgctattggcatcgcgtcgggtggctttatcttgagtaggggctaatagcgctcgctggcgctggccgagaggcagaggacgggtaggctgatgcggaaggcaacgtgtggtcgtgtcttctgccagtcatacccagcgaagagaccaaagcgtgccatatcgccccagccgatggagtagccgatctcgctgaaggcacgaccgtctccggtgaggaggttgcgggcatggagcgcatcgtccatacggaagaagcccccgaagcccttggtgcgtgagaggaggaagcgattcgaatagaagttgacttcctgcgtcgtccagctcttccccccagtgaagaaggggggcagggtcgcccagttgtccttgaagggcgtgcggtcaatgacaggagcgagggcgaagtacttctcatcgcttggggagagatattcccgagagaggtacgtgcccgcattgaccttcaggtcgatcttattgtcctcgttcaatgggatcgtgccacggacgaaggcttcgagctgctggaagcggctgtaagggacggccgaagcggactgcgtgctcccatttgggtcgaaggcctgcttatagatgacccccagctcacggcgatggccgatgggaatgggtatgcccgactcgctacgattgaggaaggagggagcccaaagcacttgtcccgaagcaagcagggcacgatggtgctccaaggggatccctacttgtggcttgcgatcctcaaagagcagggaggtcgagaggtcgaggctttcggtgagttggatgcgattgcgcagctggagatagtccttgacgaacgatacgacggggctatttgcagcagggagcgctccatagtatccgcggtagatctcctcgggagtgaggtggaaggtctctcgtgaggtatgcccgccagagagtaccatgagtccgttgagctggggcgcgtagtagaggagcaggttatgctcgtgataccagttgcggctcttgagtgcatagttgatggaggagcgcagacgtatcgatcgaccttctcccagcttacgtgctatgagaatgccatagccaaaccactggccgtcgatggcgttcttggccgtcaggaggtcaatgaccgcatcaatgccaatgcgccacttcccgaagtcaaagtccttcccacccccgatctcaatgagcgtcttcaggggcccgcctgtactgcttgagggattttgattacgagccatactcgctgcgacggcatggaggaactgatagccacgattctgattgtagggggctacaggctcgtagcggaagaagcggtctatcatcgggatgccatacttcgggcgagcctcgttggcacgaacaagctctcggcggagcccgtcaagggagtccagacgcaagctatcctgaggggtgagtcccgtctgagctcttagaggagccagcgcgatgagactcagtgcaagagcaccaagccaagtgcagtgtcggtggggcatagtgggcgtatcgggactatgcttggaggaagagctcaccgaagaactgtggacgatggaaggcgggctgaatttcatcgataggtgcccagctaaggaagtgaggatgtggggtcttgtcgccgcacttgtataggttagcacgcagtgatgtggggagcttaccagcttcgtagcccatcgtcgtccaggggatagcgacggtgacttcccatgcatgagcacccgtcagctccagcccgtgctctccgagatgagtcgcccagcgctcaatgctggcgaactcttctgcgctgagaagctcagcttcggagggagactggtggtgtgctgcgtagcataccccagcagcattgaactcaaagttaatataggcctcgccagcttcgcgctgcatgaagaactcgacgcagctgtcttcgtggacatagttcccatctccaggggagagcgtgcggaggtcttgaccatcgacgacgtaggtgatgtagagtgccttggcatcatagcccagataggcagctacgagtgggcggtgagggaagtctgcacgccagttcagcgtatcgatatagagcacttcaccttgctctcgcaggatgggagtgaactcagatagggtgtgtgcaccgcgctcgatgcggggaatataagcttgcttcataagttttgtacaaggataaaaagagggagggctacgcaggggctactcaaagagtgaggtgtagatccctacgagagctaagatgatgagtacgagggctacgatacggttgatccattcgagactcttcatgccaaagcgggcagagagcttcttgatgatataggtcaggatgacccaccagaggaggcaaccgataccgatgcccgccatagctacaaagagctcgacgaattggagcttcacagctcgtacgaactcaagtcgtgcgtacagcgggaggaagagtaggatgatgaagggattggagagtgtaagagcaaaggctccagataccttctttacactgtaggcagacttgaggcgatgtgggggagcgggcgtgtcgtcttcgctcgtcgagacgtgtcgcgtgaggaggatgatacagaagcccaagatgaagatactcccaccgagtctgagtgagctactgtactgatcgaggagattcagtacgatccctacgccccagtaggcgatgaggccatagactaagtcactgagggtcgctccgaggcctaccagcatcccatcgcgacgtctgccacgtgtcgtctctctcatgcagaggagacccgtcggccccataggggcagacactaagagaccgataagtataccttttgcaaacgtaaggagtagctctaagagaagcataggcagatgatactaatgggatggggcaccacgtagtgtccttagaagctcggcaagatcactgtcgctcttagcggggggcagtgtcgaaagagctccgcagagataatggaggaggaagtccagggtagcctgttgttgctcctgtaaaggcgctgataggaggagggcagctgtatgaagctgggggaataccttcatcagttcggctcggccctgtggggtgatggtgacgagtacactgcgtcggtctcgctcgtcagggcgctcttcagccaggcccttagctaccaagcgacggatgatctcagcacccgaggtcttctccatcgcattgagtgcattcagctcggtcttggtctggggcttgccactcataaggcttgccaaataggagtattcctcttcgctctgcaggaggtcggaggccataagcgcacgcttgatgtagcccttagagtagcgatggagaaggcttaagtgacgagctatggatacctcgcgctgctgccccatgttcgctggacgcatcgtagacgtggggcttgcttccgctccctcttgcatactctgcacaaagatgaggaagctcttcatactgagctcctcatcgttggggaaggactgctcgaaaagctcgatgtagtccagtagttccgttagtagtcgcttactcttcatcacgggcatggaggtaagtggcgatcttggggatggaggtgttacggagaagaacggtcttcttcgcatctaagaggtaaagcgcactaccgtggctcaagtcatagcgtcgctgagctgtgatgagctgtgcggagtcgtagcccagcgtcgccccagaccaaagacttctaagggctgagtctgggcgtgtagctcccgtatagacgaccaacgggcgtaggttcctctcctgcacgaggcgataaagagccttgtgcaggtggagtgcttctgcccattgctgatttctcttatctgagtcgacggagaggacgagtagggtatagggagcgttgaagtgcgatagacgtcggctcaccgtacccgtagtgtcgctcgtatggtagaggaagtcttgggcagtacgacctacagcattgtgctgaaggcgtatacgctggaggtatgccgccaccttttgagttgagtctaccttcatagaggactcttcccacgacaagacgaggctatagagcccctcgttgtagtgaggactctcgggattatatagctgcgcgcggtaggtggagagggctgtttggagagcttctccagagaggaagtttagagaacgggagatactacggcgagcagtcccgaggggagctccgtgtaggagaccacagaagtcttctatttggcgtgtaataagcgcttgcgaggtgtcaggctgtgcctccatcttgtcccagtagtggtcgatgaggtagccgagacgctcacgtggggaggtgagatggtcgggtaggtagacttcgccgagggatgaggtcgctacctttggacggcaagcgcccaaggtcaaaggtaggaatactacgatcccataggtacgaatgtagctaacccagcccttactcatagaagttatccttgaaggcaatgaactccttactgcgaaggatgtacttcccccaccaagcacgaaggaatcctgagccatagccccaaagctggatgaagcatgcgggtacagcgaggagggcaacttcgacagatcgcccggctcgatgatacgcatcaataaagaagatgacggcaagagccaatagccccagccgaccgatccaaaggaagagcgcgatgacggaggcaatggtgaagagggcgggtagaaggtgcactaatcgtgtgctcccaggatggcgcgtctccaggtggatacgtgcgatacctgagttatggacctgcttgaagaacttgcggaagtctactctgcgcttgtggtagacgaaggcttcttggatgagtgccgtgctatgccctccctcgatgaggcgaaggctgaagtcaatgtcctcaccgaagcgcatcacttcattgaatcctccaagctgcaagtatacagagcgacggcaaccgaggttgaagctacgtggcttgaacttctccatcccgtcagcactcccaccacggatccccccagtcgttaggggagaggtcatcgcatagttgatagccttctgcaccgtggtaaagtcgtccgatgcagcatcaggcccgccgaaggcatccacgggatgtttctccaggtagtcatctactgcactgagatagcctgggggtaggacgacatccgagtcgaggataataaggtactcgcctgtggcttcacgagctccgaggttacgggctcgtgagggacctccattgggtacagcgatatagcgtagagctgggaagctcccacgatagctctcgacgatggcttccgaactcacggagctgccgtcctcgataatgactatctcgaagtcgaagagctcctgatgggtcaggctctccagtagctcccgcacctcatcgggacggttgtatacggggatgacgaagctatatcgcataagggcttagagggaccactcggtaccttccttcgtgtccttaatagtgaatccgagggcagccagttcatcacgtatgcggtcagaggtcgcccaatccttgttgctcttggcctcagctcttatagagaggagaaggtctactgcgcctgagaaggcttcgcttgcgcctccttcgcctaagcgctcgtcacggagtcccagcaggtcgaagaggaagaggcgatatactcgacggagctcatcaagatcctccgctgtgatcgtggcttgcttatgatgaatggagttgatagcacgcgcagcctcaaagagctcagcgatggcaatcggcgtattgaggtcgtcgttcagagccgcatggcagcgctctgagagaccttggattccttcgatggaggtcgtgcttccagcctgtagcccgtcgagtaaagcggcagcgtcaagcagacgagccaagcccttctctgcggccttcagagcttcgttgctgaagtctactgtaccgcggtagtgagcgctgaggatgaagaagcgaatcgtcatcggcgaataggcctgctccagctggtcgtgttcgccagtgaagaactgatccagtgtaatgaagttcccgagggacttccccatcttctgcccattgatggtgatcatgttgttgtgcatccagtagcgcaccatggattctccgccttgagaggccttggcttgagcgatctcacactcgtgatgggggaagaccaagtccatgccaccaccatggatgtcaaactgttcgccgagatactttcgtcccatagcagtgcactctgcatgccagcctgggaagccttcgccccaagggctgggccagcgcatgatgtgctcaggttgggccttcttccagagggcaaagtccagtggaccacgcttctcatcctgaccatcgagagcacgcgtattgctcagcatatcttcgatgcggcgtccactcagctcaccatagttaaagctcttgtcatacttctctacgtcgaagtagactgacccattgctctcataagcaaagcctgcatcaagaatctgctgggtcaaggcaatctgctcaatgatgtgccctgaggccataggctcaatgcttggagaaagtactccaaggcgctccatcgcatgatggtagcgggtcaggtagtactgcaccacttccatgggctcaagctgctcgaggcgtgccttcttagcgatcttgtcctctccctcatctgcgtcgtgctcaagatgcccgacgtctgtgatgttgcgtacatagcgcaccttgtagcctaagtggctcaggtagcggaagagaatatcgaaggtaatcgcagggcgggcatgcccgaggtgggcatccccatagacggtaggcccacagacatagagccccacgtgaggagcctgcgcagggacgaaggcttctttgcgtcggtggagcgtattatagatagatagcggatgctgcatctcgtatatgattatttgccacaaagataatagttcttgctggcttccccgccctttgatcgcctttgtatagggcttctacacccgaatgaaggtagactttgttcagctgcttgatctttctctacagagggggagggacaagtgcctcggccggatagtggtatgaacctatactggtcgacgggtgaaccaatataggtcagcttcgcgacctatattggttgttttcacgacctatataggttcacccgtcgaccaatataggttgctatcatcccctcaatgggtatggagctcaccttggtatagagatgcggtcaaagcgtcgcttgagaaggaaccccaagagcagtaggctcacagggaaggcagaccaaacagcagtgagctggatgcctcctccttccagtccaagcccaaagccgaagagtagacagagagctggcgctatgatgaggtgtaccccacaggcatagagggccatctgcttcacgtcctccatcccgcggagggcattgctatagatgacctgaagggcgtctgccggttggtatagtgccatagggagtatggccagtgctgccatcgcgatgatacttgggtcatcactaaatatatagccgaggtaatttcgtcctaggataagtcctacgaggacgagtagtgccacagcctcagctaagatgagggctattcccacggtatgtcgcacttgtttacgatctcccttgctatgggcactgctcacgaggatagtcgctgcagccccaatgccatagtacaccaagaagcccagtgcagtgagtgtgcataggatctgatggacagccagaggatgctcacccaatggggtgacgataataatggcaaaggtccaggctgcagtctctacccccgtctgtatgctgataggtgtccccagacggaagaggcggacgaaataggcagggaagatgctgcgctcaaaggtggctcggctgatgactttaaatgagtggctatagcgcagcacgagtgtgagagccacaagcatatagatgcgcgagaggagtgtggagagtccagcaccataaagcccaagctcagggcatccccatttgccgaagatcaagagatagttcccgatgacattgagtaggttggagctaaggataatccacatggggacctgcgtgcgtccaataccatcgaagaactgcttcagcgctgctgatgccatgtacacgccgaaagagaccatctgtaggatgaagtacggccggatgagtggcagtaggtcggagggtacacggaagagctccaggaaggtatatactccgacaagtagtagggtaaggccgaaggcaatgagcagattcagtagggtgctatggcgaagaagtcgtccgagcctaagctgatcaccacgggtatgtgccttcgctaccaagggagtaagcccatagctgaagcccagtccgaggacaaagaagagggcgaagatattattgacgaaggaggcggctgccagagcatcggtgctatacttgccgaccatgatggtgtcagcgaaattcaccgagataatgcccaattgcccaaggatgataggcgtaccgatatggaggagttggcgtagcgtgtgagactgctcatgtaggtagctacgaagtcgtttgataggagtcatctgcatcttttgtgggacaaagatacgatactctctcggcttgctccctggatagatggacaagaggccccctcccagagctgggagggggcctcttgacgatgctttataagcgcttgcttatggggcagtgcaggtctgcgtgggagcggtgcactgctccttctcgagggcggtgatgacctgacggatctggcgacccaaaccgatggtgtagccctgcgaaacgaagaccacgcggttgaaggtgtcagcgatgacgaagacggggaggttaccagcacggagcttcatattcgtgacgagctcggagaggatcgtacccttgtcatcaagaccgaagactgtgcccttgggaagacctgcgaagtcctctggacggtagcggctctggctcgtcttgtccttgaagaggagtacaaggttacggccccagtgctcgaagacttcacgctctgcgatgatgtccttaagcgcatggttcgtaggctcttcgcctgctccgaggacaccgaggatatagtagccacggcctgtcgtcgtgaggatggactgttccttaccagtgggggctacgaactgctcggtcttcgtcagatccttagcttcaccatagtaggtatagaggttctcagcattgaagctaccgaggactgctacagccgtggtgtcgcgacgcataaggagctcctcatcggtcgtctgccctgccttgatatcgaaggtgcgcatattcaccaggacgctaccgctcgccagacgtgagcccgtgacaagcaggtaatgccctgcatccataggagcgccatccttgaaggtcttagcccacgaggtcccttgctccagcccgttgtcaccttcgtcataggcaagtaggcgagtctgccccttgtcgtcgaacttggagatagtgaactggtaatagtactttggattgtcgatgataccattgtccttatagctcaggcgaagtgttccctgcttagcagctgtctgggggagtcccttgtcgaggatgacatcgtgccagccatccttctcatagacctgtaccttacccgtcaccccgtcgatctgtgcaggccagcccatggcacgtgccagcgagacgaagaagatattacgagagtgggtatcagctttctgactcttccacaccccgataggctcaattgggtaggtcagtgggttgtagctattatctatctggatggtagcgacgcaccactggcgtagggcttcgagggaggagcggaacttgctctgcagctcttgtggaactgcttcggcaaagtatttcttatagggaactaagggctcgttggctacacgaggattgtagatgtagctcatagcaagctccttgttcgctgcaaactgggggaggggtttcgtgttatccagatggtcgcgtagcacttcgagaggaatgtcacggcggtccttagcggagatgactcggaggagagccttggcctgctcttgatccttagagccctcgacgaattcgtgtaaggtcttccaattgccacgagcatcgagaccctcgagctgcttcccgacgaaggaggccacgtactgcccgcggatagagtcctcgacagccatgcgacgattgttctcagcacgctgggcctcagtgacgttggggtactttgcatcctcacgtggaggtgtgatgaggaggtcttcattgatacgatctcccgggcgatacttcagctggaggcgtacctgcttgtcagtgccgaaggtgaccttctgcatgccgaagcgatagcttgtcccctcgggcttgctggcatagacgagcatatctccttgtcctgcagtgagtgagacacgaccagcggcatcactgaccttggtagctacggtatagaactccccatagttgtacacgcggaaggagacggggacaccagcgagggggcgacccgtagcatcggtgacctgcacactgaccttgcctacatgagcatagttgtcaatgacattgatctcggtgtaggtaggagtattcccgataacttcctctggtccgtcatagcggccaaaagccttcgtgtggacgagcatggctcgggaaacgggagcgttgaaccatgcgagattgagcacaggctcaggctcgcaggctccgaggaagagccacttgccatctacccaagcttctacccaagcatggttgtcatcggtgtgtgcccagcgaggggtatagacctggcgagcggggataccgactgcacgcagagctgcgaccaagagcgtggactcttcgccacagcgtccataggcagagcgtatggtagccagcggagaggaggtgcgggaatcacttggcgtatagacgacgtgctcgtggcaccagcggttgacctcgagtacagcatcatgtagggagagtcccttgacgcgatccttcagagcgtcaaagaataccatgcgtgaggcgtcaagcgcctcattattgacacggatcgggaggacgaagtgcttccactcacgctcagggatggacttcccccaagggagttcctttcgagcgcgtagtgaggcgcggacattctcaaggtagaagtccccatctctatcgatgaggtcattcgtaggcatgtacgcatagaggaaggtcatagcgtcacgctcctcgggagtcatctgttgcttgaagattcggaagaagtcacccttggggaaggccttctgcttggcaaggaaatcctgctggagcttagaggctgtggggcggctggtctgtaccttgcgggtcggcttctgagggagagcactgagctcagtgatcccaccgaggagcccgagggcaagggaaagggtgatgattcgtgaattcatgcggatgtgtatagtatctgtacgtcgtgcggatgagtatcgagtaggcttactcgagtgcttgtagggcctctacagcctgacgtatctttttggggtcagtgaagaggtaggcatattcgtcgatggtcacagtgcctcccattgagacgccctcatgacggtagcgcatgggacttggctcggcagttcggcctgagaagtggaactctcgagcacctgtcttacgagcaaggtctgctacattctctggggtgacaccagctccaggcatgatgatgatgcgatctgcagcctgcttgacgagggcggcgatggcgtctgctccctctggtgctgaggcggcacctcctgaggtcagtacgcgggcgcaaccagcttcgatgatgtcctccagtgcctgggcgcggtcctgacagacgtcaatggcacgatggaaggtcacggggaggccttctgcggcctctacaaagcgacgaaggaggggcttgtctacggctccgtcagctgtaagacagccgacgacgatgccgtcagcgcccagctcgcgagccatgcgaatgtcggcaagcatggcctctacctcaatgggagtatagaggaagtccccgctgcgtgggcggatgatgacgttgagcttgatattgatagctcggcgtgcggtgaggatctcaccataggagggggtcgtacccccctcggggagaccagcgcagagctcgactcgataggctccgcccagctcagctcggcgagcgctctcggcactccctgcgcagttctctatccgataggtactcattattgtcttagtggagggtgacctctacgatatagtcaatagcattggcttctgatggagccttgtcgaaggagagcgtcagcccgagctttgtctgctggaaggggatggggcgacgggtatcgtaggctaccacgctcttcaccttctcggtcaagggcagtgagagcatacggctcttccagtcgaggatatgcaggtagacggtcttacccttctgggtcgataccccccattcctgcggaggaatgatgccttcgcgtacaccatccttgacggtcttgccgtaggtcttcatccacttcccgatcttctcgaggcggtcgatagccgtagcaggtagagcacccgtagcttcggggccgatgttgaggaggaggttcgcattgcgacctgcggtctggacgagcagacgaatgagggtcgtatcagacttgtaggtctggtcgatgatcttgtagccccacataccattcatcgtctggcaggtctcgatggggagcttactgatagcctgaccggagagcccagcggtgttggcaccggggacatcacgctcaaacatctggaagtcttcgcctgggtgtacttcaccgtggtggttattcccgataaggcaggcggggttgagcttgtggatcccagcgtacatcttatcgaagttccactggaagtctgggttgatatcctggtcccattcaccatcgaaccaaatagcttcggcattgtagtcgcggacgagttcggcgagctgggcgttcataaaggtgtcatacgtcttccacttcccgtgcttggtgcgacccgtaccctggcctgtgcgcccgagggggtagtagtcatcgcggtgccagtcaaggagggagtaatagatgtggaagcccagcccctgcttacgacactcgtcgcggagctcagcgaggatgtctcgcttgaagggcgttgacttgatgatattgtagtcgctctgcttggtgtcccacatagagaagccttcgtggtgacgggaagtgatcgtcagatagcctgcaccagaggccttgatagcagcgacccacttagcggcatcaaactgtgcggggtagaaggctcctgcgaccttggaatactcatcacgattgagattggcattggtcatataccactcgccctgaccgaagatgctatagagcccccagtgtaggaagatcccgaagccacgatcgcggaatttctcgcgtgcagcgaggttctccttagtaggcttatagttcttttgcgcatgggagataaggggtgaggatacggctaagccaagggccaaagcggccacacgtgtagtagttaataggctcttcattctgatgttttagttcgtcaaatatgtgtattgtctacagacgtaccaaagatactcaattcggcgcatactgccgagaaaaagcgcctgaattcaagggcttctttcgaggtcgataaaatcgtcctttgagtaggatcggtaaggggatcgtatggggtcagtaggatctactgatatgggcaagaaaattgaccagtactggttgacgatttgaccagtactggtcagagcggtgaccagtactacttcatataggtgatcagtactggttcactcaccgaccagtactggtcgcagcaagcatctcatagaactatttctaaggagctgtatatgatcgccccccacggtgggttagttgatggactaacctgctgtggggggctaatttaagtggatggtatggaggaaactacttcttcgctcgcgagaaagagtaggggcgagcggaggcgtgtgtaccccatgaggtagctttagccctgagggtgaaggtcatcgagcctccacgtcgtagcgtctcatagtcgatataggtcttctcccaaggcttgccattgagctgtgctgactggatgtaggggacgctgggatcggaggcacggatgacgaagctcttcccctcgggcatggataggcggacctctcggaagtaaggcgtgccgatagcatactgcccgagtgctggtgtcacgggatagaagcccagagcagagaagacataccatgccgaggtctgcccattgtcttcgtctccgcaatagccgtcggggcggtcagagtagaggcgtcgcatgacttcgcgcacccagtactgcgtcttggagggctcccctgcatagtcgtagaggtagatcatgtgctgtatgggctggttaccgtgggcgtagttacccatatccatgatctgcatctcacggatctcgtggatgacgaagccatagtagctgtcgtcgaagatgggagggagggtgaaaatgctgtcgagcttgcgagtgaaagccttatctccgcccatgagatcaatgagcccctgcacgtcatggaagacggaccagctgtagtggagtgaattgccttcagtgaaggcatctccccatttgaatacggagaagggagactggaaggagccatcctgccggcgcccgcgcatccagccgatgctggggtcgtagagcttgcggtagttcatcgctcgctcggcatagagctgctgttggtcagctgaggctcctgccttctgaagggcctggaggatacaccagtcgtcgtaggcatactcaaggcttcgggcggcatgctcattgatccctgcatcggaaggtacatagccaagtttgttgtagttcttatacccgaggcgtccggtggagcggatgcttggatgttcgttgttggcaccgtggagtagcgctgtggtgagctccttcggatcaatacgtcccagccccttgacgaaggcatctgcgatgaccgaagcggagttgttgccgaccatacagtctcgatgtccggggctcgcccattcggggaagaagccactctcgcggtaggcattcatcatcccctcagccatcttcgctccctcctctgggtagacaaggtggattagcggcataagggctcggaaggtatcccagtagcctgtgtcggtatagaggtagccagggagtatctgcccattgtatgggctgtagtggacgacctccccctcgccattaatctcatagaagcgtcgggggaagaggagtgagcgatagaggcagctgtagaaggtgctcatccgatctgggctatcggtgacagctatacgactcagctgcttctcccactcagctttgccttcctcgcggacttgctggtagctccgagaggctacttctcttaggttaagctcggcttgctcacggctgatgaacgaggaggcaacatagaaggtcgttggtgagcttaccttctcgccggcgagatttacagcaacaagggtgtgtcgtccgcctttgcctttgcgctcctcacgcacgagacgctggataggctcggtgaaccgcacgatgaagtagttcgcaaagcccttaggcactccgccactattcttacggctgataccagctatggtatagcggtccagctgctgaatctcggagcctgagtcaaaggcatctaccacgatccagcgctcctcgggtcgtgccatacgggagaactcgacctcaaagacagcggcacactcactcggagccatgcggacgcgtgtgtcgtagtcagccagatagacctcataggaatagggacgagcctcctccgccttgtggctgaaccatgaggctcgcttctcctcgtcaaagacaggagctttccccgtcatcggtagtagggagaactgcccgtagtcgttgatccatggactaggctggtgtgtctgcttgagcccgcgtagcttggtcgcctgatagctgtactgccagccatctcccatcttccccgtctggggcgtccagctattcatcccccaaggacgggagatgacggggtaggtgttgcccgagctaaggtcgaaggtgctttgagtaccgacgaggggattgaccagatcgacatagctcgtggggctggtattgctcgcctggagggagaggcaacagccgagaagcaggctaagtggaaggtgtcggagtaatttcatcaaggataagtgaggtaaaagagaagggggcgggaagaccagtgcttcccgccccctcagatgttgtagaggatgacggaggattactttgttcggctgaggtagccgtggtagcgggagatgatttcgtctacgtagcgtgcgacgcccttacctcggagatagcctgctcggcagacggggtcattgtaatacttcgcttcgctcttcaatcgtagagccgtctcgatacccccctcccagcgtgtagaggagtagccgtacttctctgccagtcggatagcatcctgcaggtgtgcaggaccagcgttgtaggctgcgagggtaaccttgatacgctcctctggatcggtgagttgcttttggaagagtgcatcaattgatttcaagcagtccactgctacacgtacggacactgctggatcgaggagctgcttgaccgaagcaccatagatcttacccgttcggggcatgatacccattagtccacgagcgcccgaccaaccaacgacctcggggcggaagttcgactcctgataggcgatggaggccaatacctgccagggccagccgatgcgtcgtgcctccttctcgaagagcttgtcgaagcgtgagataccgtaaccaccactgggagtcggttcgtgtgtagcggtttccttgggctgcttctctgtggtagagggaggcgatgggcgaacaggctgagtcccatgcgacggctcctttatttctttcttggtcggaagctcacgctcttcctttgtctgggtattggggagaggagattcctctccatcatcagacttgctgagctcgaagtagcgcttatagatctcatggaagcctcggtcttcggggatatccttcgcccacttatccagggcatcagcgagtccaatagccttgggagagacaaaccagcgaagacgctgtgcaaagccaacctccagcgagatgtccagctgagggtagtaggtcttgctgagcttagccaagtctgcatcagcgatcgtatagttgatctctcggctggcgacttgagcgatgaggtcttccgtactaatggtatcggctgtaatctcatgcatgaggatcttacctccaagctgctcctcaaggcgcttgatacgctcctcagcgcgtgagccccccatgacagtcagctccttaccgaggagggctgctacatcttggatgtaagggatgctatcgcctgtcttggctttgcgctggacaagtaccagtcctgtcatcacctcaggccccgcaaagcgtaggcgctccttcgcagagtgagtcatagcctgaggggtgatacagagatcgacacgcccttgctcaaccattgcttcagcctcctccatgctgtgagtgacgtagagcttcagcgggagcttgtggctttgagcaaagaggcgcaccagttcgtactggtagcccatcggttcatcgcggtagatgaagaaggtcgtagcacctgagagcgtgacgactcggagtgtatcggggaggcgtagctgctctgcttggagctctctcgctgtcgcttgcctagtcctatgcctcaggaagacagccgtagctatggcaatagcgatgccgacaagtaggaagagcactgtcgggcgacgcagggatgcaaggatcttctgaagcatagtttggggaattaggggagagggctagcggcgtacgagctgtacgacgttctcgatatgatgcgtgtgcgggaacatgtccactgcacgtgacttcgtcacactgtactcgcccgttgcggtgagtagctgaaggtcacgagcctgtgtggcgggattgcagctaacgtacacgatgcgtcggggagctgcacgcagaatcgtagcgacgacatcttcatgcatgccagcacgtggggggtcggtgatgatgacgtcaggctcaccatgctcgctgatgaagtctgtggtgaggatatccttcatatcgcctgcgtagaagagcgtgttctcaatgccgttaacctcgctattgacgcgtgcatcttcaatcgcctcgggtacatattcgatacctacgacggaagcgcactgcctggcgacgaagttggctatcgtccccgtccccgtgtagaggtcatagacatgctccgagccagttagctctgcgaactcacgagctactttatagagctcataggcctgacggctattcgtctggtagaaggacttgggcccgatacggaaacgtagaccctccatctcctcctcgatgtactctcgcccgtagaagcaatggatctcttggtccccaatggtgtcattgcacttaccattgatgacgtagagtagggctgtgatctggggaaagcgctcctgtagagccgtgagtaatgcgatgcgcgcagcttcattctctcggtagaagacgaccacaaccatgatctctcccgtagaggttgtacgtagcatgagggtacgcatcagtccctcctgcttgcggaggtcaaagtaaggatactcctcgggacgagcggagcagtagtctcggacgaagagacggatctcatccatgacttcggctccgaggtagcaggtgtcgatgttgaggaccttgtcaaacatccctgggagatggtagccgaggccggagagctcatagggctctggtggcgtagagcgtgcgttgagtacgtcaagctcctctgggaagagccagcgcttgtggctgaaggtgaactcaagcttattgcgatagcgctcagtttccaccgagcctaagatggggagatattcgcctacctcaatcttgccgattcgctggagggcgtcgcggacgacctgatccttgctctgtagctggagggagtagggaaggtgctgccacttgcaccccccgcagatggtgaagtgtgagcagatgggctgggtacgctcaggggagggagtgacgatacgtgcaatcttcccttccataaaactgctcttcttttttgtgatctggatatcgcagacatcccctggtgcagcgaagggaacaaagagtaccttgccgtctatatgggtgagcgccttgccttccccagcaagacctgtgatcgtgataccttctaaaagagggaggtctttcttcttacgtgccaattgtcgtgtaaaccgtgagtgatatgataagtacaaacaccaagcctcacgatacggggagtcacaatggagcttccctgcatggtgaggcttggtgtgttgcttagttaaggtaagagaggaggacggccttgaattcgtctgcgagacgctgggcctcctcagctgtaggagcttcggtgtagatgcggatgatgggctcggtattgcttcggcgcacatgtacccattctgtcgggaggtcgatcttcaccccgtcaatgaggttgatatcccccttgtcgctgtattccttggctaagcgctccaagagagcacctgcatcaacgtccgaagggaggtctactcgctgcttgctcatcgcatagttggggtaggtggctcggagttcgctgaccttcttaccgctctttgcgaggagagtgaggaagagagcgataccgacgagagcgtcgcgtccatagtgaagctcgggatagatcacgccgccgtttccttcaccgccaatgagagcacctgtctccttcatctttgtgactacgttgacttcgcctactgctgctgccgtgtagctaccgccatgagactctgtgacgtcacgcagagcacgggtcgagctgaggttggagactgtatttcctcctccattcagctggagtaggtagtcagatactgcgaccagtgtgtattcttcgccgaagaaagcgccacgctcatcgatgatggctaagcggtctacgtcggggtctacaacgaagcctacatcgaccttgctggatccgatagcagcacagatctctgtgaggtgctcagggagtggctcggggttatgagcaaagtgtcccgtaggctcagcattgagagcggtgacgtgcttgactccaagggcctcgaagagtgctggaagagcaatgccacctacagagttgacgctgtcgaaggcgacgtggaagtctgcctggcgtatagcctcgacgtcaactgatgggagagcaagtacagcttggatgtgctcatccaaatagctctcctcgctcagaatgcctccgatgctgtcgacatcagcgaagtcaaagtcttcgctctcggcgatacgcaggatttctttcccttcagcatcgcttaagaattcgccacggctattgagtagcttgagggcattccactgcttggggttgtggcttgccgtgaggatgatccccccatcagcctgcttccctgtgactgccatctcggttgtgggcgttgtggcgagcccgatgtcgatgacatcacatcccattccgaggagcgtccccgtgacgatgcagttgaccataatgccagagatgcgggcatctctccccacgatgatcagggggcgagccttttttgtctgctggcggatgaaggaggcataggcagctgtgaactgcgccgtgctaatggggttgaggccatcggagacgtgtccaccgatagtccctcgtatacccgagatggacttgatgagtgtcataaggcggggagaagaaggttattgctggggcttcgtatagaaggtatagaccgccttctctacgaagaggctgttaccagcggtatagttctgtgagggaccgaggtcgaaggggatgatgagctgtacgatagccccgtcaccgagtagcgacatagggaaagcaactccttcgcagatgaggtcttcatagacgccactttcgttgagagaactgtagtggatcttcccttcgctggtctcccataaggcatatcggaagaagagaggacggacattggtatctgtgaggttgtcgaagattgctcccttggactgcgatacattgaagaagtagcccttcagctgtaccgagacagtggtcttatttgcttcagggcgggtcgtccccttgtcaagcacacgtatatatagtccattggatagacgatagaatacatcgggggcaatggtcgagggtagtgtctcgctatcgagctccttcactgtgaatgatgattccttgatcagtcggtcaatcgcttggcgctgctctctcttgagctgggagagaggcttaatggagcgattcttcttgcaacttcccagtgccaacacggggatgagaagcagtaggagcagggcgatgcgatgggtgataagtctattcattatttctgtctatgcttgctggacggtgatgatgagcttagatgacttcttgagctctcagtttccttagttcacaaaggtagatatttttagcctcttggatagagccttggtgctcagctcctgcggcattgaggtgtcctccccctccgaagcctgcgctggcaagttggttgacggggaaggtacctgtggatcggaaggagagcttgacctgagtcttatcctctcggatgaagcaacagcagtctattccctcaatagtcaaagggatattcactagcccctccgtatcaccctttgaagccccgaagcgctgaagttcctcctgagtaagaatgatacaggccgcacggagatcagggtagagctcgagcttttggtcaaggacatagccttggaggcggatctgtatctcggggttgtggtaggtgaggcggtcgatgatgtataggtagtctgctccacgagccaaaaggtctgatgttgtgacgaagagctctggggagagatggctatacatgaaacgtcccgtatcggtgatgatcccagtaagcaggagggttgcagcctcaggcgtgatatactgctcccatccgagggataggataagggcatgaatcagctcacaagttgcagaagcctcgggatagctgaagttcagagtgaaagtgggatcaggatcgaggtggtggtcaattaggatatggggagctttggactgctctacggcctcaatgagtggggtatagcgcaggcggcttggctggttgtggtcgaggtgaaagatgaggtcagctgcggaaatggctctgagacattcctcctctgcctcgggatagatcagaagctcatcaaggtagggaagccagctgaggtagctctcgatacggtctgggctgagtacacggatggtagcctctggatgtactgcctgaaggacttttgcccaagctaaggtactgcccaaagcatctccatcgggagctgtgtgggggaggatgatgatattgcgatggctaagtatgagttggcgtagttgctctacgtgctctatagaccagtggtatttacccatattactatgtcgaggattgtggtagccccatgctatgagtgttctttgctcatagcatggggctctcctatgaagtgctggaaggaagtcctttctactatcggttgttgaggtagtttgctacgtcgctagcacgtacgctgcgtgtgttgctctggcgacgagactggctggacgatcccgagtagctacttgctggtgcgctaccctggcccttgtaatattggagagcggtgggcaggtaggcctcgattgccttgatgcggttggcatcactggggtgagtgctcaggagttcactctgctggccgccaccctttgactgggccatcttctgccagaagttcactgcatagcggggatcataaccagcgatagccattagtacaagccccatcttgtcggcttcatattcctgcttacgaccgaaggggaggagtacgccgacctgagcgccgagaccataggcttggttcaggatcccactcagcatctccgagcgtgagcctacagtggctccgaggagctgtccaccagcttgcatgagcatctggttgctgatacgttcgttggcgtgcttagccagtgcatggctcagctcgtgacccatgacggcagcgagctcatcgtcagaatggctaccattaccgacgaggttcagaagtcctgtatagacgacgatctttccgccaggcatacagaaggcattaacctgcttgctgtcgactacattgaattcccagctcagtgtcgagagcatagattcgtagccattctgcttgaggtagatgttagtagcagcagccagacgacggcccacctgagtgaccttgttgttgtacgtgctattgtggctgagctgagacttgctgatgaactggcgatactgcgtcgcactggcggcgaggatctcaccatcggagacgaggttgagctggcgacggcccgtgatgggtaccgtaccgcagctgttgaagataaggaggccgataccgaagagggtagtcagggctatgctaagcttcttcatattcataagagttggagtcgtaattaagtgatacaatataatagggagctacttgacgagaggtatcatcttatagtagcgctggaaggccttcaggtcgctggcttcttttggagccatgccttcggggatagagtctaagtctacgggacgaagacgatagatcgcctgtccgttgggtgagcgcttctcgacgaaaacatactggtagtgtggctgggtcgtccaagctgcattcttactttgtcggatcagcgtcaaggagaggagcatcccaccgcgagtagctggcggagtgatttggttgctaatgaagttccccatcgagtagataacgaaggtctctccacgctgcgtatcttgtctctggaggcgcgtgctctcttgcacgacgtgagggtggctaccgatgacggcatctacgccttggtcagcgagccattgcgcgagctctcgctgggatcggttcggggacttctcgtactcgttaccccagtggatctgtacgatcttgtactctgctccgaggctatctgcacggcgtaggtctgccgcgatgtgctctttgcttatcgtgtctatgacagttgggtggggaattggaagcccattggtgccataggtgtaggccaagatagcaagcttgatcccacgtactgattgtatgaggggagtgcgtgctgggcgctcactgaggttacgatagctccccgtggtggctatcccaaggctgtcgagtacatcgatggtatgggtaataccgtagcctcggcgatcgcagctgtgattgttggatgtcgtgaggacatcaaagccagcttcacggagggctactgagagggcttcgggggaggagaacatgggataaccgctgtaaggcttacctccaaaggtcgtctccagattgcctatcgccaggtctgctcgctcaatggcggggcgtacaagaccaaagctttgagcgaaatcatagctcccatccgattgggctgctgcacgtatctgcggcccatgagtcatgatgtctccagcaaagataagctcgagcgtatcgccacgtagggtcgtgctatcgatgtgtgcagatgcagcctggctctgtgtgctactctgcccatggcaggatagcgtgagcaggcaggctgagagcgctgtagtagatacgagtgagcgacgtagccccctcaagaaatgaaggtggagcatatttatttacttgtattcggggcggtacttcccactctccttgtcctcgaggatgccgagatagctgatgtagcgggaagaagctatacgcccagcctcgacggcttcgcgtacggcgcatccaggctcatgggtgtgtgtacagttgccaaagcggcaagcagtactctcctcgaagagctctgggaagtaatgggatacctcagcatcctccatctcgagcataccgaagcccttgatacctggagtgtcgatgagatagcctccctcggagtaggggagtgggaccatctgtgagaaggtcgtggtgtgcatccccttgaagtgagctaatgagatagatcctgtgcgtagctctacgcctgggatcagctgattgatgagggtactcttccccacaccagagtgtccactgaagagcgtgatctttcccttgaggtggtcaatgagggcttcgacaccctctcccgtcgtcgctgagactcggtgacagggatagccaatcccttcgtagagggcgatgagctcctccatatagtcgatagcctctggagtatagaggtctatcttattaaagataagttccgtggggactcggtaggcctctgctgtggcgaggaagcggtcgatgaaggtcgtactggtctcaggtgctgcgatggtgcagacgaggaaggacgcatcgatgtttgcagccaggatgtgggactccttggagaggtttgcagcccgacggatgatgtagttcttgcgggggaggatatccttgatgtagagggtctcttcctccgcttggcctgaggtctgctctacgacgacgtggtctccgacgacgatagggttggtcgagcggaagccacgtagacgaaggttccccttggctagacacgggcgctctacaccatcctcagtgaggacgatgtagtggctacctgtgttcttgatgactaagcctgtcaatgcgttgataacgtggatggcggtctcgcgcggagcttagaccgtcatgatctccttctccttagctgcgaagagctcgtcgatcttcttgatgaagcggtcgtggagcttctgtacttcgccttcggcgtccttagctacgtcctctggagtgttgtcagccttgatgctcttcttgatagcatcgttggtgtcacggcgagcattgcgtacgcttaccttggcattctctgcatcggccttgacctgcttgacgagttcgcgacggcggtcttcggtgagcggggggataccgaggcgaatcagctcaccattgttctctggggtgatgccgagaggggagttgatgatagcacgctcgatgtcacggatgatacccttttcccaaggagtgatgacaatactcttagcatcgggtatggtgacagtacctacctgtgtcagagggacggggctaccatagtactcgaccatgataccgtcgaggatcttgacgttggccttaccggcacgtacacgagcgagcgcctcctcgaggtgctctacggtcttctccatctggctggcggcttgtgctatcagccctttcagttcgctcatagagtttatttagtcgttgttgataggatggttgcttgttcttagaagcccacgtaggtgccgataggctcgccactgaggaccttgaggaggttgcctggagtgtccatgtcgaagacgatgatgggtagattgttctccatgcacatagtggtagctgtgaggtccatgaccttcagcccacgctggtagatctcatcataggtgatgcgatcgaacttcgtagccgtaggatccttctcggggtcggcggtatagatgccgtcgacacgagtacccttgagcatgacatcagcctcgagctcgataccgcggagggacgaacctgtatcggtcgtgaagaaaggattccccgttccgcccgagagtatgacgacttcgcctgcctcaagggcatcgatggcgcgacgcttggagtagaattcgccgataggctccattcggattgcggtgagtactctgttcttcacaccacgagaggtgagtgctgagccgagggctaagctattgatgacggtggccagcatacccatttggtcgccttgcacacggtcgaagccttgggcggcaccacttaatccgcggaagatgttgccaccaccgatgacgatggccacttgtatgccgcgcttgactgcagcttcgatgtcttgtgcatagtcagcgaggcggtcattgtcgatgccgtattgcttcgctcccatgagcgattcgccactgagcttgaggagtactcgtctgaagttattcatttcgttctctttgaatatagctactactatggtgcaaagaaacgacttttacgcctaatctccacgctggtgagctctgctctgagtttaatgctcagcttgcgctgggagagagcctttgtagagggggataaatgaaccagtactggttagcgatctaaccagtactggtcacccctacctaccagtactggtcacgacgcgaagtagtactggtcacgatgccgaccagtactggttcgttttcctcttctttagaggcggccctcccacccgcataagcagggggaagttcgtatctttgtcctcataaaataagtagataagatatgtctcgactcaatagctggatgagctactttgtgctggtgcttctctccctctctttcgctgcttgctcgcagaaagaggagaaaggggagacacccccagtacagctcctcctgatccaagcccaaagcctctcacgcctcgagctggctacgacacaggtacgtattgtacttaagatcgatccccaccgcgacggcttcttaggattcaagaagctcttcggttcgaaggaaacccgtgtggagctccttagccaagcctctgcctactgcgatctctcgctactcacggagaaaagcatcgtacagcaggccgacagcacagtagatctctatcttcccccgatcgaggtcaagcgggagctggataatctgaaccacaacgtcctgcaggagcctacgggcttgcgccgccgcctatcaaccaacgaacttgatgagattattcgctctcgccagacgatgatcgacgggctcgttgccaaagctttggagcaagagcggggcgcactaatccgcacggcatcggctacgctgacgaataagctgcagccgatcttccgtgacctccgccttacggtgcgtgtccacttggacgaagccgatgcctccctcattcagtcctctaagtctgcagcacaatgataaagctctcttggcggatccttcgcccgatcctactccttattatatgtatagctgcggggctcttcatctaccataagttcttccgcaaggcaccccagcccgaggtgacgactgaggaactgcagatgaaggtcagtcagcgcctgcgcctcatcaccgaggaaatcagctaccggcaggatgtcaatctctatgaagcggggcagcatgctgtgggcaccgccgacctcgtcgcctacgtcaagtatgacctcgagaagctccacttcacgactgcaggcgacaccgtctacgtgagccttcctgcgcccgagcttgagctggggcgacggccaggcggaaatcactccgtgcgctactatctggatcgtggtgggcgccttggtgaagccagcgctgaccgcgtagcgatacgtcgcttcgacgagcgtatccttcgcgatgcggagctggatatacgcaccagccctcgctatctccccgccgcacagctgcgtgccgaggagcagctccagcgcttcctctccgccttagctccccagcgcgtcatccttgtcgtccctgagatccgtatgccccaaggtgatctccccgccgcttcctccacctctattcctcatgatcagcgtcaataacgtatcggtatatttcggggctaagcctctctttgaagacctctcgttcgtcatctccgccaaggagcgtatcgctctggtgggaaagaacggggcagggaagtccaccctcctcaagctcttggctggaatcgctgagcctactgagggcgtcattagccgtcccaaggggatcagcattggctacctgccgcaggtgatgaagacgagcgatgagcgtaccgtcctcggtgagtgccagcaggtcttcagccatattacggagctggaggctgaagtcgagcgcctcgccgaagagatggcgacgcgtaccgactacgatagcacggattatatggagcttatcgagcgccacgctcagcgctcggaccagctcctcatgcatagcacggggagtatcgaggctaatatcgagaagacgctccttggcttgggcttcgagcgctcggacttcgatcgctccacggcagaattctctggtggctggcgaatgcgtatcgagctggcgaagatcctcctgcagcgtcctgacgtcttgctcctcgacgagcctacgaaccatctggatatcgagtctattcgttggctggagcgcttcattgcttcgggatcggcggctctggtgctgatctcgcacgaccgcgccttcatcgacgctacgacgaatcgcacgctggagatcgagctcgggcgcttgcacgactacaagacgaactacagccattacctcgtcctacgtgaggagcgcctcgagcagcagcgccgcgcctacgagaatcagcagaaggagatccaggcgaccgaagacttcatcgagcgcttccgatacaaggcgactaaggctgtacaggtgcagagccgtatcaagcagctctcgaagattgaccgtatcgaggtggaggacattgaccgcgcggcgatgcacttctccttcctccccgcggtgacgtcgggtgcttaccccgtgatcatcgatagcctcacgaagcgctacggcgagcacaccgtcttctcggatgtgaatatgaccatcgagcgcggagagaaggtcgctttcgtcgggaagaatggctcagggaagtccaccctcatcaagtgtatcatgggagaagtcagcgactacacgggcacgctcaagctcgggcacaacgtcgagatcggctacttcgcccagacgcagagccaagagttggacgggaactacaccgtctacgagacgatcgaccgcgaagcgcagggggatatccgcttgcgcatcaatgacctcctcggggcctttatgttcggcggtgaggagtcggagaagaaggtctccgtcctcagtgggggcgagcgtggtcgtgtagcccttatcaagctcctccttcgccccgcaaacctcctcatcctcgacgagccgacgaaccaccttgacatccgctcgaagaacgtcctgaaggaagccatccttaacttcacgggtacggtcatcatcgtttcgcacgaccgcgagttcctcgacggcttggtgtcacgtgtctacgagtttcgctcgggccatgtgaccgagcatatcggtggtatctacgattggctggagaagcgcgaccgtgaggacggcacgtcgatcagcaacccacgagccgccgcacccgtgcagcgggagacgaaggctcctgagtccacgacgggagcgcaggactaccagcgccagaaggaggcggctaaggagcgtcgtgccctcgagcgtgagctgaaggcacaggaggagcgcagcgaagccattgatgccgagctgagtgctctggaggagaagctcgctgatcccgcccatgccacggacgccaagctcttcgagcagtacagccagctgaagaaggagcaggagcaagtcctcgcccgctgggaagagctcagtatgcagctcgaaggctaagccgtttccccgaagaaaaatcccctctttttgtacggcgggcgagctccgtatatacagtgggaaatttcggtatatagggaaataaattttcgtatatgcagaaatatttttccgtatatacacaaatatattttcgcatatacggaaatttagcctcctttgcaccgcaggaaatatccctttgcaagacgctctatatgagtgtgtaatcgtgggtatttccttgctgattagaagccgcttttttacccctatttttaaggtgctttgggcagtgttttatccccagatgcgggctgcgaaatggctccctcgtggcgaagatttccctcgccgcgcagggcctcgcccttgagagcgtgctgaggtgcttcttttcgcgctcttgccgcactcggagaggggacgaagctgcagaaaatagtacttttgcacctgtatggaatcaaatgtaagagaggcggagagcctctatacgaaagagatcttagagttcgctgcagtcggcgtccgctatgccgcgctcttagagcaggcttccgagcgtgacgctctcgtcaagcaactggtggcactcctgccccagctctactcggtgacgctgcaccttccctcctatttctacagtcccgaagccgattatatcgaagagtatatcaccgaaggtgcctatgaggccgtgcgcagccgtgtctcgtcactcttcggtgaggatgacgcatacctctcggcgcagtccgaagagatgacctacagcgacacgccgatagcagccttcatctccgaaggcctctcggatgtctatcagcaggtaggcaacctcctcgggatcctacgcgacgagaatgaagaggcgctccccgcagctgtcgggcgctgtcgccactacttccacgaatattgggggcaggcactcctcgagtcgctcacagcccttcatcgtatctacacctcccagttacagacacaggatgacgacaaagacgagcccgaagagtccttcggggaagaagacggcgaagaagccctcttcgacctccgcttctaaaaagcgcaccgctgtcgagaaggcagcgccccaagagaaggagcgccctgtacgccgctcgagcgccaagccctcggccttcgctccggtctactcttatcccccttcgatcacggacgaggagttgcagtcgcttgccttggcacgctgccccgctcccatcaccatcatagagacccgcgaagaggcacgtcgtgtggcgatgcgcctgcgtcgtgctggcatcctcggtattgacaccgagacgcgcccaagcttcacagctggtgttcgctacgaggtctccctccttcagatagctaccgaagaggagtgcttcctcttccgcctcaataagatgggcttgcccaagagcctcatctccctactcgaagatccagcgatcatcaaggtagggcttagcctgcgcgatgacatcaccgccctctcacgtcgtgaagccttcaccccaggctccttcgtcgagctccagaagctctgcggtggctacggtatccgcgagctcggcctgcagaagatctatgcgatcctcttcgctgagcgtatgagcaagtcgcagcgcatgagcgactgggaggcgaagaagcttagcccagcacaggcgcactatgccgccctcgacgcttgggcatccctgcggatctacacgacccttatggcgctccccgctccatcacctactcaatttgccctgatataaatgagctatcctacgctacgcctacatcctcgcaaggaggagtccgtcctgcgcttccacccctggatcttctcgggtgccatcgcttccttctccgcccctgtggaagatggcgacttagtctccgtcgtcgatagcaaggggcatcccttaggtacgggccacttcggtgggggaagtatcgcagtgcgcctgctgagcttcgatgcagaggaagtcattgaccgtgccttctacaagcgtcgcctggaggcagcgcttcgtctacgcctctcgtgcgacctcgttcgccccgtcggctccagcgatagccccaatacgacctaccgcctcgtacacggtgaaggagatagtctcccagggctcatcattgatatctatgaccgtacggccgtagtccaagcgcacagtctcgggatgcatcaggcacgccagaccatcgccgaagtgctgtgggaggtcttcgctgaggcaggcgaccccgtcctccctctcgagggcatctactacaagtctgagacgacgctacccactcgtgatatgcgcgaactcgcttcggacggcttcctcatcgggcataccgaggcagcgcctatctatgagaatggcgtgcgcttcactcccgactggcttaagggccagaagacgggctttttcatcgaccagcgtgacaaccgcactcttgtagctcactacgctaaggggcgcaccgtcctcaatgctttctgctacacggggggcttctcgatttatgccctccacgcaggagcaaagcgtgttgattcactggatagctcggccaaggcaatgtacctcaccgagcagcacgtggctctgaactttggtacggattgcccccgacaccactccgtcacggaggatgctttcgactacttagagcgtatgcccgagggcgagtatgacctgatcatcctcgatccgcccgccttcgctaagcaccgcaaggtcctgcgtaatgccctcataggttatcgtaagatcaatagtatcgccttcaaaaaggtcgccccaggtgggattgtctttaccttcagctgctcacaggcggtatcgaaggaagaattccgcttggcggtcttcaccgcagcggcggcctcggggcgtaaggtgcgcatcctgcaccagctcactcagcccgttgaccaccccatcaatatctaccatcccgaaggcgaatacctcaaaggcctcgttctctacgttgaataggagagcctgaaggtatatttccccttcccaaagcttcatcatcaatgaaagtaaagcacctcatcgaggagaattctctcctttgccacttcgtcgcagagatgcgcgatatagagatacagaaggatgccatgcgcttccgtcgcaatgtcgagcgcgtcggtgagatcatggcctatgagctgagtaagaagctccactatacggagcgtgacgtgcagacgccgctcggcatcgcccgctgtgctcagatctcggaccagatagtcatcggtacgatcctgcgtgcaggccttacgttgcaccagggcttcctcaactactttgacaaggcagagaatgccttcatctcggcttatcgtaagtataaggatcgcctgaacttcgatatcttcatcgagtatatcgcttcgccttctcttgaggggaagacgctactgctcgtagacccgatgctcgctacgggaagctctatggagctcgcctatcgtgcgctcttgactaagggtacccccaaggaggtgcacctcgtctcgattatctccagccagcaggctgtagatacgctctgcgagtctttcccagacgacaatgtgacgctctgggtagctgctatcgatcccgtcctcgatgaccacgcctatatcgtcccgggcttaggggacgctggagacctggcctatggggagaagctctaagtcgcccgattacctccttcgcttctggctactggctctggcggtgacgctggggctccttctgctctacttcctgccggataacatcttcggttgggagccgaacaaggtagacttgctctctgacctacgtcgtgagcaggtagactctcttgctaataagagcgaagacgccgtagctcttagccagcaggctcgtagcacggataagaaggtgcaggagcgtgagcgtatccatcgcgagctggaagctcaagcaaaggcggctacacccgactcggcgatgtctgctgagaagctggactcgaccatccatcctacaagtatccttgttgatatgactcccgctcacgacggcctgcagcatttctttgcgcagctccgccgtcgtagctcgctggggcgtcctgtacgtatcgctgtccttggagactcctttatcgaaggagatatcttcaccagcagcatacgtagccagctgcaagctcgctatggtggctctggggtagggtggcttcctttgacttcggagacagcaggcttccgtcgtacagttcgccacgagtttaagggctggaaagaatataatcagcttcactccaagggacgctatccactcccgagccactactatacgggctctgtcggggactgggtgcgctacacccttcctaagggagctcgtccctgcaatgaagcggtcatctattataaggctccatcaggagctacccttgaggtctctacgaactcagaagaagctacgacgcttgagctcccagctaccgaggcgcttagtgcttgtcgcctcgcctcaggctcgattagctctgtgcgcttcaccctcacgggtggggcttctggcttcgtttgctatggagtttcgctggatggtacttcaggggtgagcgttgataacttctctatacgtgggaactcggggctcatcttagcttcgcttgatgctgagcttaataaggctttcttcgcagagcgaccctatgaccttatcgtcctgcagtacggcctcaatacaatctctccgaagcaacttgattactcgggctataccaagcaactgggtaaggctattgatcaccttcgtgcaacgacggggcgtgccgactatctcctgctcggcgtatcagaccgtggtgtcaaggcctcggggggagcagtagtcacgatgcctgccgctcttgctttagagcgtgcacagatccgtctctctgccgataagggcgtggtcttctggagtacgcgtgaagctgtcggtcgcctcggaggtattggaaagcttgccagcaagggctgggctgccaaggactacacccacctctctcatcgcgggggtgacgagctcgctcgccagttcctcgatgccttcttcctcgaagaaaagtactatgatgcgatcaagtaagcgtgcagcacttctcctcacggtaggagtgctgggtattgctggatctctatttgctgctggtccagtgccaaagagcgagccgaacttctatgctcccacaggctactttgcgagcttagctcaggagctacgcgtagcagcaaaaaatggtagcacggtctccattgttcagctcggagatagtcatatccaagcagggcatacgacggctccactgcgtgcctcgctgcaagcttccttcggggatgcaggacgtggctggataggctggtacgcgctctatggctccaattctccacgggattaccgagtcacctcgtctggatttggttggcagcgtgagctcatcctcaagcctgagggcacgcgtcctatgggcttagggggctatgtgctctctacgcgtcccaatagtcgctttactatcggtgtcacatcttcggatcaccctttccgacagatgcaccttgttcgcactgcttcttcgctccccttgaccgcattccctcttgccgagctccgcacaggacgcttctctacgggagcctacgtagtagatacgctttcttggcgctcaccctatacgagtgtcacactcacgggggcggaggagaatgatgcggatgaagctgtctatgcgggctgtgtccttctctcagggatgggtggtgtccttgtccatgatattggtattaatggggctgcttaccggcactatgcgctcgctgactatgtcgagcagctctcattgctggagcctcaactgctcatcctctcaatgggaacgaatgactgctacagtacgcgcttccagatggcagacttcaccgagagccttgagcagatgcttatgctggtcaaggaaatcttacctaagacaaagatcctactgacaacccctccccccagcttcttccgccaagcctctacgcactatgtcgtcacgggacgtcggcgtaagcaccgcaagaaggtaactactatgacctatcgattcaatgagaatgcggcgcgtgtctcagaggagattatgcgtcgtgcagagctgcatggcgtagctgccttcgacctcttctctgctatgggagggcaatcagggatcaattcctggatcgccgatggcctgatggcaggtgatcgtgtgcactatagccgtgatggctatgagcggcaggggcgacttatcacctcggccctggagcgtgcactctctattcgctaacccttttacgacgaatgaccttcttcgatacaatcgactgggggagactccccgatgtactgcgctttgaccgcgagagtccgatgatcttctcctcgggactcttcctcttctgtgcgctctttttcctgccgatctacatgctacttaggaagacgacgacgctacgcattatctacgtcgctctcttctcacttttcttctactacgagagtagtggggagtatgtcttgattctcctctttgccgccacgatggactacttcattgggcgggctatggggcagagtgaagatccgcgtcatcgcaagcgcctcttgatcacgagcgtctgtgtgaatctcgggatgctctcatacttcaagtacttctatttccttctggatctggggcagacattgctcgcagcgattggcatcacgacacctccagcagtgccattggaggctcgtgactacttcatccctgcgggtatatcgttctataccttccagacgctaagctacacggtcgatatctaccgaaaggagatcaccccactgcgtcgctggattgattacctcttttatctctccttcttcccgcagctggtcgctggacctatcgtccgtgcgaaggactttataccgcagatctatcgtcgcccgcagttgctgaaggctgaatatggggaagcccttacactcatcatcagtggcttgatcaagaaggcgattatcggagacttcatcggggcgaaccttgtagacctcatctttgctgagccaactcgcttcacagggatagagaatctctttgcggtctacggctatgcgatgcagatctattgtgacttctcgggatactcagatatggctattgggatcgccttgctactcggcttccgcttcaatatcaactttgattctccctaccagtcggggaatattaccgagttctggcgacgctggcatatctccctctcaagttggttgcgtgactatctatacattccgctcggcggaaatcgaaagggacagatccgcacctatatcaacctcttcctgacgatgctccttggcgggctatggcatggagcagctctccgctttgtcctttggggagccatccatggtgtggctcttgctctgcacaagctgtatatgcagatctttgatcacttcggatggcgtcgccgtgagccccttcgttggcagcgtttcgcagggcagatcattaccttccatctcgtctgctttgcttggatcttcttccgtgcagactcgatggagacagcttgtgcggtgattactcagatcaaggatcacttcacccctgaggtcttcctgcagtttgtcgtgggatacaagaatgtcttgctgctcttgcttataggttacctcctgcacttcacctcacacaagcaagaacttcgcttccgtgagtggatcacggatctctctttccttaagcaagcattgctctttattggggtgatcttcctgctgatccagatcagaagcgcagacgctcagcccttcatctacttcaacttctaaaggcttcctccactcaactatcatatggcttgcccgcaccgccttcttgaagcggtgcgggcaaactgtatatcacagagctctctgtagagaccctgtatcaaccactattggtcggcgagtaaaccaatagtggtcggtgtgtggaccaatagtgcttcgttcgtcgaccaatattgcttcgcccgttgacctatataggttgctactcctacttttattgcttttttctatcatctcctatctatgataggttaccgattcacctatgggtaggttgagcagaagtgcttatcaataagtctagtccttaatcctttagttgaggagcaataaagcttgttgtgatattatcttgggaaagctttaagagaataactcctatagccttggaacatagacatgtgattataggcatatcgaaaaaggcctgagggataacgtcaatgatttaattcacgcaccctgggaagggtgcgacctttgcaaaagagtgtgaggtgcggtggggcttgtttcaattcacgcaccctgggaagggtgcgacaacagactgttttcggtcgtcgtatctacggcgtttcaattcacgcaccctgggaagggtgcgacggtcagtgctctccgagccgtcaaagcggatagagtttcaattcacgcaccctgggaagggtgcgacaataatcatcgggagtaactgtactacgaaaatcgtttcaattcacgcaccctgggaagggtgcgacttgatatctccgaggttgttactactgccctcacggtttcaattcacgcaccctgggaagggtgcgacgatctactatatcatcacgcaagaccagcaagtagtttcaattcacgcaccctgggaagggtgcgacgacctgctcgaggtgtacgagcttggcgatgatgtttcaattcacgcaccctgggaagggtgcgacgaggtatttttgtacctcatcttcactaagagacgtttcaattcacgcaccctgggaagggtgcgacgacgccacccagcccgaggagttagcgccgaggaggtttcaattcacgcaccctgggaagggtgcgacgaagacgtagacttctgcttcaacggcgtgcagagcgtttcaattcacgcaccctgggaagggtgcgacctccctcggcatcgaccttatgacgcacatagagctgtttcaattcacgcaccctgggaagggtgcgacagaagccgtggtgccgctgaggtcgctactccaagtttcaattcacgcaccctgggaagggtgcgacgccttcgccgccgccgagcagacgaagcagacggcgtttcaattcacgcaccctgggaagggtgcgacgcccgcttcggcgtctttgcgctcgagacgggactgtttcaattcacgcaccctgggaagggtgcgaccagagcgccgcgcaagcatcgacggactacataatgtttcaattcacgcaccctgggaagggtgcgacctacgcctcgacacgcgacgaggtgatggcgctacgtttcaattcacgcaccctgggaagggtgcgacggggagctggtagccgcgggtattgccttcagtggtgtttcaattcacgcaccctgggaagggtgcgactacgttcaaaacgagcgttattagagaactcagagtttcaattcacgcaccctgggaagggtgcgacatgctcgtactgagaacaagattaagcgtctcaagtttcaattcacgcaccctgggaagggtgcgactccagaggtgtagaaaccttgatcttctggtttgtttcaattcacgcaccctgggaagggtgcgacgtaacgcagggaaaatgtctcataagttaaatcagtttcaattcacgcaccctgggaagggtgcgactcacgaggatgaagacgtaaatcctcatcagtggtttcaattcacgcaccctgggaagggtgcgacagagcgagtagacacatcattaacattaccaagacgtttcaattcacgcaccctgggaagggtgcgacctctttatacaccgcagtgacttagggggtcaaacgtttcaattcacgcaccctgggaagggtgcgactaatctcctgagcttccaaaggcttaatatgcttgtttcaattcacgcaccctgggaagggtgcgacttgagctgtacgtgcaagagcggactggatacgagtttcaattcacgcaccctgggaagggtgcgacagagcgcagacggcttaataccagagctggtaaagtttcaattcacgcaccctgggaagggtgcgacagtgtggtgcaaaggtgcgtattatagggcggataaacaagcgtaatctgcgactgggggtattgtcttaacgataagggctatgcttatgcctctattcttgcttatgtgattgataaccagcgcctgcggatgatacggggaatgactgttcgcttggggttcgctggaggcttgtgtagatgcgctcgggaacttactgagaatgtgcttttggagaggtcgctgaaatgtttaggtagggcttgctgaggtggggctacacgattagttccccttcgatctcgaaggaggtgaccttgccatagacgtggatctgccgttggtagtgcttgtctagctggtagatccgaagactatcctcttgatcatcgatcacggagaggagttcatggcgaaggtttacgagctgtgctggatcgaccaagcattcgaagaccgacgcttggacccgctggccgtagttcttgcagatgcgagctacttggcggaggcgcttagcgcccgagggagtcgccgtggcgacatcgtaggtgacgaggatatacatcttttgctcagactattaggaatacagggtactcatccaggtcccctcgtaggtgtctggctaagaggagcgcttggatatacgggagcaggcctaggggcatcttctccttgagaaatggatgggtgatctcatcctttttgcgtttttgccagagagcaatgagacgtttgcgagcatcctctttgaggagaaagcccttttctccctgtgggatgaagtcacttcgctcgacctgccttttgttgatgatcgataggacaaagcgatcgactaggtaggcacgcatctcctccatgagatcgagggcaaggcctggcctacctgggcgatctacgtgaaggaaccccacgtaggcatccagacccaccgtctcgagggctgcacgcacatcttgtgtcagcagggtgtagaagaacgagagtagggcattcacttcatccttggggggatgtttgcttcgtcctgagaaggtgaattctttgttgaggattaggtgttggaataggccgaagtagatattcgcagcatagccttccactcccatcacgcctaagcgtgaggtctgctcggatagcttatgttgctgctgtctgagcagtgcccgagcctcttcgatctcgctctctacctcatgcagaggatgatggtcccgacaaaatcgggctaagacactccgatggttcgctatcttccctgcgatgaagatcgaagccatatgcgacgagagtacgtcgtcatcagccagacgatattgctcccgtcttaggagcacattccccttgatcggcccttcgagcgaaccgatgtacttccccgtcggagagaggaaggagagcttcaccccattgtgtacgcagagcgacatggctccaggtgaagctcctaggtatgagaagcagaggatgctctcgaggttgtgaatcggtacacgtagcgtctcctcatcgtcgatgcggacgacgatattctctccatccttgactagataggcattgggcgtaaggatatagagggtgtttagaaggtgtctcatcgcttagcaagggctggggaattgattcgatactcctaaggagaataggctagccttccaagtaccccatacatgcctccctcaagcgacccatgcatgggtcggtcgaggaccccattcatggggcggaagtggaccccatgtatgggtgcctagtgaggaggatgatctaaggggagaagagtatgagctgtgtgccttgggttggctgaagttatgccctatagaggctgatgggcgcttcgtgatgcgtgctcatgaaggccttagcctaagggctagtcaaggaggtgatagcgactgaggtaatccgaagctcgctctccttgattcatctgaggcatgcagagatctagtagagagcaggagcgacagcatgcagcgtagcgtggaggaatgctctctccgcctttgtataagcggtgcatctcgatagccatctgtagggcctcggtgcgaagctcagtgtcgaaggtaacttcctcccgatgcttcgtctcaccatagaagaggtatccttgggaaatgtgtatgccataggcttcctcgagacagatagcttcggcgcagagctgtagcttgtcggcattcgttcgcttgggtcgtccccgcttatactcgattggtatagcctcccagtctcctgggtacttggggtgatggaagtgagccccttgggactccgatgctgggtgtagctccacagcatcggagtatccatagaggccaagtgagggggaggctaaggggacggagcggagtgtgataacactgcctcgccgaccactctcctcgggctgatgcaccttctcatggagtagatgcccttcggacgtcagatgattttcctcccagagttgctccacatggatgaggtaccactgtctcgggcagaaagcatagtgctggatgcctgagagggggagcatctcgtcctcggggtacatggtgcgctagatgaggtcgagtagctggactcccttgggaagcttgctctcatcgacagtgatctcgtagtcgctgaaggagcgggcaggacggctgggatcctttgcttctaccttcaccagctcaaagagcttgtgagcgggagcattgcctaggtcatctttgtgcttgaagacgatgagtcgacgcgcagccatgagcccacgggcggcggagcggtcgaggtcgaacatgttcttcagcgcctcccagagcagtgctaggtcgtcctcactgaatgtcgtctcacgagctagcgccgcagagatgaagccatgagcacgatagagcccgtagggtacggtagccttgcgccccatggtgcgctccttatccttgtccttctcgtcggtgacggccatacgggtgactgtatgctcggaagtcattactgggtctatggagcgagcaaatgtcagctggacggcacctcgtacctgaccagcattcttccccgtagtcatcacagctccaaaggtgcggatgtcgtagtagtgctcgcacatgtactgtcgagccttacccttattctctgactccttagttttatccttggcatcgaggtcaagagctacataagctttatcaatctcaccgttgaggactgcggcctccttgacgaagatctggctgagtggatcacctcccaccttggtctgcacatagttacgaaccttgcgcttgaggcagacatcggtgacgagaccttgtcccgtctcgaagtctatgcgagggaggttccctgcatcagggtctccgttggggttgccatcttgtacgtcgaagagatagatgaagtcgtacctgttctggataggttgcttactcatgattgtatggatattaagttgggttaattttctgtttcttgttctgcttcagtagctccattctcatccttctgatcgcggtaggccttctgatgatagtagcccacagcgaagatgctctgctggtcaggggagaagaacttatcgaacgtagcttgtcctccagggaggagttctagtacctcctgtatctgtcgatcgaagtagtagccgaggcctccttgctccttcttaatctttgataagtggaaggctgagagctggaggagacgaccaaagataatccctggtgtcgctgaagctgtacggaaatagcgatcggtgatgttcgccttgactccgggtatcgctttctcttggatgcgctctagaagcgcaaagagtcgtccggctaagtaggctgggttggagtttgacttgtctagtgccatagttagctgttttatttgagaattctttctgtgtttgcggttgatgtatgccttgagtagggctgctcgaagctctgtgacgggatacttgctggtgtggtcatgatggatccgctcgaggcatgccatctggagggctggtgcataggggagccccttgatgatgctctcaaggagctcttgcaccacctgtctcggccatttagtgctatctgtcgctgtgtagatagccttcatgatcctgtagacggggcgaaggggaggagtatcttcgtctaggagaccattgaagcggacgatattcatatcatcgaggtgtgcgagggtattaccgacgatctcgctgattgtgccttccatccagagcttgacactgacacgcttggcgtttggcgcaagtgctaagatgtagaagcgatcgaagtgatcccgatctatatttgcattcttacctcctagtgctgaccgaagagcctggaccaccaccttcgtcccttgctcggggttcttcttcttggctactttcttcttggatgtcgaagtggcttcctcttcctcatcaaagtcgctatcggaagggagaccagtgaaggtggcttcctgatagttcttgagcagttcatcgtcctgcagggtgttccagaatacgaatgtagtctctcctatgcggtagtttgtgttcttatccttctcaaggagcaggttgagccccgagataatggcatcggatgccggctgagagattggggcattgagcccctgctccttgccataggaatcatagcccgagaatttttggaagctgatgagcgtagcattggcctgagctccgaagagactgatcccaccatgtagtctagctatggtgcccttctctccagtgaccaagcatcgtcccttgtcttctccttcctcctcagcccccccagcttggtacgactggatatcttcatgggaggagatcagcttattaggattactctctgtactcagtaggaatgagatatttgccccgacctttttcttgatctccagcaagatgtcttcagggatgatgttcgcaaggtcttttacctcctctgcaaatagatctgaaggctcttcctcctttttctcttcatacttcttgtagaagagttctatagccttgaagcctttgttctctgggaagagctctcggaacttagcgagctcttgcttgaaggcatcatgctgtttaggagccatgacctgcttctcttcactatcatccgtggggatccccagcacatagccagagtgatcccagaggatttgggagattgcatagctcttggatcctgagcgtcctttaggtttggctacgaggtactcacggccttgcttattctctttatctcgggtatcaatcacccgtctgaatgtaccatcctcatcaatgacgatgatgaagggaatagctttccattccataccagagggagctaccttccccagctccgccatcgcttggtagtagtcgtagagtgctttgagtatcatctgagtatctccttacttgatttgtggggaacttcgatcacaccatgctccatctgggcatggaagaagaggggaggaggacactggagattcttctcgaagtccatgtcgaagagcatgatcccgagatctcgagattcgtcgatgggtaagtcttgctcctgacctcgtggaatgtactcaaaggagcaggtgaactcacgacaacctaggtagggctgtgtgaagcactgccccttggtagctcgccctaagaagatcgcatcatacttctcgggtgtctccgccttaggatctttgcactcctcttgctgcttcttggtacgcttctccaaggggatgaactccatctcggcatagatgcggtaggctacatcacgaaggatataggctgtacgctgctgacgattctcctcgatgaagagaggctttatagccttgtggctcatcgtagatcctacctcattgcgacggatagaggtgcgtgagatgggcttgagtacctcaatcctacggacatgccattggatggctggcttccagaagatgcactggaagatgttgcgtgctgccgagggagtgatgacatcgtagctgacacgctcgaccttgagatcgggtcgtgtgaagcaggcaaagtcaccacgtatctctaagcaatagagtttagggtttgtcttatccatagttgctgattgtatttgttgcttgttcgtttagccgaagaggggctcgtcgaggaggggattcgtcgtgcagacaccgagagcctcatcgtagccttggggcgcaagtactaggatgctcttccccgtctccctatcgattactacctcggagagaaggcgagcttcctctagctcctcatatctccacttagagatcgatacatggtactgctggagctcccttagcgtcctgtgattgaggtagagggtatgcttctcaagcccctcaaggagctccttccctctgccgtaagggacgaagaggtcacgatctacattttctatgagctggaagtcttcagaggcttgctggaagtcaaatcgccagcgcttagcttcttcctcatcatataggctctcggcaatattcttggagtcaaagctctcaatagaggcgtagtagcggtcgtagtacgcttcgataagctccagaggtatgctgggacgggtatgttccttgtcgttgtcgagtaggaagcgtgttgcattctggccatgggctatagcaccgaaggctttaccgccatcacttagggagaatacatagacttcaccaggagttggtcgctttccttctctattacagcgcccacctgcttggacgatcgagtcaagaccactcatagctcggtagacgatggggaggtcaatatctacccccgcctctatcagctgggtgctgatgacgattgtggggatcttcgccttcagacgctgacgcacctctgcaatacgttcctttagatgcgccgagcacatattgcgggataggtggatgacattctgagccttcttcccttcctctagtagtgcatggtagagccgtgaggcatctcggcgcgaattgacgatacagagggcagagtcgtgctgagatagctcttgggcctgctccttcgtcgtgtacaccttctcctcgagatgatagatgactcggtcaaataccttgaagagctcgggatcttcggggatgatcggctggatatcttcgctgagctgatggaagtcatttactttcttaaaggagctactatggtccttgtcaaagggtgggagtgtagccgagcagaagaggagctgcgtgcggaagatgcaccttagatcctccaggaggcgaagcatgggatgtaggaattcggtcgggaacatctgtacctcgtcaaaaaccacaacagagttcgctatgctgtgcacctttctactccgtgatactttatgggagaagagactctcgaagaattgtacgttcgtcgtcacgatgatcggagcctcccagttctccgctaataggcgtgtgcgctcgtagcgctctacctcttgggaggctttatccccagagaaggagatgtctgagtgatgctccagtacattctcctccccgaagatctctcggaagatacctgctgtctgggtgatgatcgaggtataggggatgacgtagatgatacgcttagcttcgtgcttcagagctgtctctagtgcccaagtcattgaggaaagcgtcttcccgccacctgtggggaggaagagcgagtaatagcccttcgagcaggtacacccatgctctcggcattggttgaggaaggctctacgagcctcgttgatctcaccctctatcgagaagctctccatgtgctttgttagccgatctctcaagatctctatggaggtatatctgctggtagcctcatgacgacactcttttcgctcttcatccatgaaggcttcggtatcaaggaagtctgcatctacgaggcaggagaaaagtagacgaatcaaggcttgggcttgctcctcaccttctacacgacttgcaagttttcgtagataggcctctgttctcggcccgtgctttctgatccaggtttggatctcagacataagttcagagagattttcctctgcctttttgctgcgatccttagtatctatatcttcaagtttattttgtagtcctgcatagttgtatagtcctcggtggtgcccgctgatagcataggccagtagctgagcgatacgagtgcgcttgagtagactccccttaggaagagtggatagaagtttggtagatagaagtgctcccgctgcactatgtggagctttggttgcactctctccacggatatagctctggaaggcagactgagccttccccgcatcatgtaatctgccgaggagttcacctaaagggatgagttgcttcagcccagcttcagtaagattacggcgtatctgaagagcaacaccttctacatgatcatataaagattgttcttctccgccttctgtacggtgggctatgatggtggtgtcgtgtagcatggtttcgttgtgcctaatgaagtttttatctgtgtaggcttgttctttatgtcaaaggtaacaataaatagctttagatattgtgctttccctctcttccagataactttcaaggtgtgagtggttaatgcttaacatagcttcttaatcatattcttccttttaaatattatcaaaagagaactgcttagctacctggggactgaagctgtaggcggatagtgtcaaagtaatagtcgttggcccacaaactagtagctattccgtgtatgaacgaatagttgttcgtacgcgatacgaacagtcatttgagtccgaaacctataattattcgtgtgcagatctgtagttatttacgaattcatcaaagaattttgtgtcgtgctggtagatgttgtctcagtatacccttaggtttttttgatgatgaggtcctacatctctatcatcctgtctctccttaggagtatgtcttgtttttactttccaatagatttgctctctatctatacggctagtgctgactgatggctgagtgactcttactcaacaccactcgccgctaccgcttccccttagatcagcaatgcttacatatccttacgggaaggctaagttgcgtggagagtttgatattatcccctgacaaaagatagacaataagttgtttagttattttaaagtaattttgcccgcatactatatgtattcaccaagggagggcctgagttctgtgtacacaggcttctctctgaaaccatattgagagaaggaataagatcagtggattatttgcaccgcacgcatagtgcgctactaaggcaaggcaagcccacgctacagcgggctctaatgaatgagatcaattgggaggatcggatcatcggtatccgtggctcccgtggtgtggggaagacaaccttcctccttgactatgcccgtcgccactatgcgcccgatagccctgagtgcctctacatcaatctcaatcagttcagcttcacgacgattcgcctggtggactttgtcggtgacttcatcagacaaggcggtcgtcggcttttacttgatcaagtcttcaagtatccgagctggatggaggagttcaaggaatgctaccatcgctatcccgaactacatatcgtcttcacagcttctgctgtgatgaacctcgaggaggaagaccctgagttggcttcgatcgcttcgatctatcatctggcgggattctctctgcgtgaattcattcagctggataacgggattaccctccctacactggagctgcaagatatcatggagcatacgagtgaggtcgtaggagatatcttctcctcagttaatccgggactatggatggatcgttaccttgagtatggctattatcccttccacttggagccgcgactgtactcggagaatctgctgaagacgctgaatatgacgctggaggttgaccttctcttcatcaagcaactcgagcagcgcctcctgcacaagcttcgtaagctgatctatatcttagcgcaacgtcctccgctacagatgctcaatatctcccagctggctctcgagatcgagacctcgagaagtacgatcgtgaactacctgcgctatctctccgatgcacgtgtcgcacgaccgatctaccgagcagaagataccgagatgggtaagcctgctatcgtctatctgggtaatcctaacctctatcacgtcttgggtcaagaggcttgcgatcgctcagagctcctgcgtactttcgtatttaatcagctgagcaagggacatcaggcgcgtatctcttcacgctcctcactggccctctttgaagttgatgggcactatccccttcagatcgaggaggagcttgctggtcgctatcgcagtgaccgctactatgtgcttgagcgtggtgacctttcccgagagaagacgatccccgtctggctcttcggcttcctctactaaatagtctatagaatatcccaactataaatacagacaacaatgaaactctttaagaatctcctcctcggcgcaggcctcgccctcgctactggtacggctctctccgctcaggagctgggtcagctccactatcgtgctgaagcaggtcttgcgatctcgcgtatctcagccctcggtgtccaccacaatggtgacacgggtaagtatctcaccagctttcgtgctgggggtagcctcgtgatgcccttcgacaatacgatcttctctttcgccccaggactctacgtcgtaggtcgtggtgagaagcaggggacgatccttgatgatggtctgaatcagaagaagctttctaccatccagacctactcactccagctcccactggatctctccttccgtctggctacgattgcagagaagcaccgcatcttccttaatgctggtccttactttgcttacggtctgtcggctaagctttcgggcgagaatatcgataaggatctctataaggagaatgccttcaagcgctttgagttcggtgtaggtgctaaccttatgtatcagtacaaccgcgtttatcttcgtggcggtatcgatgcaagccttacgggcattacgaagaagagtctgggcgcaccttactacatgagcctcaagactcctcgctatgtcacgagctacatcaccctcgggtacgagttttaagactcgctggagataacaaaaactaagtgacacgccccatgagcagagctgctcatggggcgtgtcattttatctgttagggaaatgcttgctacttgtgctcagcgatacgcttcttaatagcatcgataaggctctgcaggtccattccactacgttcgctcatcatgccgaccgttgccttggggatcatgatgcgtgccaagggggaggagagcatcttgaaggctggattaatctcggcaagagcccccttgagccaagggtgatgctcaaggagatccttgaggcgggtagaggctgtgatctctgcatcagcactatgacccgagcagccacagctttctgccttctcttcggtatctggtaccacctcgggtgctgcaggagcgtgactacttcccttcatgcaggagcaggatacatattcgctctctccctctactgcaggggcgggagccgtaggcgcagcttctgcgagcttgtcatccccatgcttggaggccgccttgttgctcttgtcccaagagaggagcgtgcgcgagccttcgaggctacggatacgtgtgcagtcctgcatcatctcgaggacgccacggaagcgcccttcctcatcgcgtacagcgacgtagtagatatagatgaagagtccaggcttgttgatccagaagtctacttcattctgctctccacggcggaacttctcgacgatctcttcgacaaggtgtacgctggtgcgtgggtggcagttctttacatcacgaccgatgacgttcttactacgagggaagacgcggtgatcggtgtcggtgtagaagcgcacgatctcgttctcatctacataggagaagtctacaggcatgtgcttatagacgaggttgatctgctcaagggtcatctgacccgtagctacctcgagaagtgcgcccggtgtgctccccccgccgaagccatacttaccgaggaggctcgcaagttcgttggcaaagcctgctgcagctgtagtaggtgtggtctccttagaggtatcagccttaggagcttctttgccgacttgtatccatgcaaagccaatctcacggtcacctgacttcatctcctcaaactcggctgggcggatcatcgccagcgaagtggggtagagtactgtctcttccttctgcatcaggtcgagtacgtcagctacgactgtgggctgcatagcgatgaactcatcgtccttattctcctcgaggagacggcgggcatcgcggatctcatcgcggatgaagtcgtcgaggagccacatcgtcgtggtgggacggtcgaagcccttgcgctcaaggatcgagtagagctgattctgcttgcgcgagaggtgaaggcggaacttatgtagctcatcatagagctcgagccactggttcttgatgactgggtactgagcaagctcttcgacctgcttcagtagacggcgcatctcatcgttctcacgcagatagcatatgatgggatggtcctcggggaggtcgggacggctgcggtcgagtacatcttggaagagctccatcatctgctggatatcttccttgcgacattcgtcttcgtcgaaggtctttagctcctgctctgccaaggcgatctcgtagggacgcagtgtcttgacgcgctcacggagtatggctcgcgcttcgtcgagcgtgagcttgccgtcgaggtatcgctccttggtgtcgagtacgatctggagcttctccatatcgatctcgggcaggttattgcgcatattctccatacggggagggaagcttagaggttgatgaggtagacgaagaattcgctgtcgacgagggcttcgatgccgatgaaggcttcaccgccgaagtgcagcagggtgcctgggcttagtgtatgctcttcgctattgttgagggttgccttgacttggcccttaacgacgctgaagaagatatcctgcccctggtgatcgtgtggtgcgatcttcttgccttggggaaggttgacgtgtacaaccataagcttgtcattgttgatgacttggccaaactccttgatttccgttccgatcataatgctactatgtggtgatatgtgtgatgatctatcgggcaggatgaggggtaatcatcattttcaccctgcttccatagagaaagtatcctgctttatctttcattcgcaaagaaaacaaatatatctggcttttcgttcatccctcgacaattcgttcgcactcgactgccccagatgcagcaagggctaccccatatactgatgatatgcggtagcccttggcgtatatgagtcgggtaggctatgccttagaagctgtaggcaagaccgaggccgagtacttcacggaactggaccttggcaccgcgctggttgccagctgcgtcgaccgtcttgatatcgtcgtcgtagacgaggttcgtggtcagcgtcgtggtgaggaacttattgatcttgaaggcgatcatcatatcccagttcacgtcgatgttaccgaagtcctcgttgtaaggcgtgaagagcgtgagcttcgtgacgaggttgatgttctcagcgagcttacgcttgtagttagctactgcaagagcaccgacttctgcgagcgtcttcttaccgggcttaaccccgaaggctccagctgcagagaggcggttgtcaaggacgaaggtcatcttccctgtgatgggagagagcagtagggagaagtcttcgttgggcttgtagtcagcaccgatagcgagtgtcagatagcccggggcgaagagggtagagatgtacttatccttgttccctgggatgttggggttcgtgtcagagtcgtacccacgagcgaactgcgtgaggaagtctccgagagcagagatgctccagtgcttggagatgttgcgaccgatcttggtgctgaagttcagcttatcgacgctcttgagccacttattggaggtcgtgaaggtcttaccgaagtctgtgatcagggcattgtcccagctccagtctcccttcttgtagttagccgaagcattgaggtagaggttccaagctacggagttctcaccacctgcagcccagttggtgagtgatgtctgagcaaggttaaggcccgatacaccggagaacttccatgctggtgcaggagctggtacttcgggagcttcggtggggatagagtccgtctgtgctgctacctgtcccacggagagggcgaggagcgaaaaggcgataaagagtttcttcattgtctgtatttataactatgcttgtgtggaattaccttagtttaaaaggtctgcgaaattacacatttttatataaagtgtgcttgtgatccagaaaaggtgcgaatctatcctgtctaaatctatggaaatattggagctatattgaggtcgtatctgccagtgccaagcggatccttcgataagattgccctgtggagactattgccgagactcctgccctctatttagagtgtcaaggcatcgtgcgcccagttctctgatatgcctctccgaagagaagagatacataagcccttcgccttatcgcgagtattcctcttatccagcggagggaaaagcatcgttctcgtgaagaaaaaagcgccttcacgtagtggttttcctctgtctatgcacgtagtcttaaagaccaggcacgtaaatcccaatatccacgtacgtagatgttagatccacgtacgtagcccaaacttatcagccactcgtccaaaacttttatccctacgcagagcaacaacctaatagaggtcacttcacaaagctatatagcttccttcaccatccaatatagctccaccgacgcacccatatatctatagagaatattgtgcaagtccacctcttcattactcgtaccttcttgaagctactcttgctgtatgctgtatgctgtatgctactctattgtatagcggttcttagatgatgcaatagaagcctattcgtaaacgactactggtttcggagtcaaacgactattcgtttctcttgcctcaagagactgtgctacactttcagtacctttacaagaagagtgccccacacaagcaccctaatatcaacaccatgagcacaatgaatcctcatgtcatcaccccctttataaggagtagtatagccctgctcctcttggggttaagtgcactactcagctcactccaagctcagacgcctacggatagcctccgctcggatgggggctgggaagtttttattgagagtcagctacaggtgggtttgcttaccgaagaggaggcgcacgaagcggctgtactctatgacgagctgcggcgagcacctctagatatcaattctgtccgagaggaggagctacgtcgactcccgatgctctcggactatcagatctatcagttcgtccgctatcgcaccgatcatcaggcttttcatgaactctcagagctgaagctggtaccaggctggagtctctcgctcatcgccctgctacgccccgtcatggtctgtcgccccatagccgaggagcgccccttgctgggaaatacgttagaagccacccacgaggcgcgtatcttttatggtaagcgtagtagcaccgactttccttcgaagaagccacttctcggctcggaggatgcattacggctaagctatagctatgctacgccccatagcctgagtctcttcttcgcgggggagaaggactatggcgagccttggcgacaacgtacgcaccgaggactcgatgcctatagcctgcatgcccagctggagcatcgtgcgctgacccttgtcttgggtgattaccgcgtggcacgtggcagcgggttgatcctctcgcaaggagctttcccgctgagcttcctctcactgaccccacgccagggtacgggagtgcgtcctgtgcggagtatgactgagagtgacttctcccgtggggcagctggtatgcttagcttggggagctaccgcttggggctcttcgcctctcatcgccgtatagacgcacatcgctctgacgagggcttgcttactgcgctctcggagacgggactgcatacgacagaggtggcttgggcggcacgtcggcaagctttgacccgtctctatggaggatggatcgaatatcgtgtacccgatcttgagctatcactacagggagtgtatcaagattggcaaggagatcgactaagacacccaccagggagccaaggtgatgcgacgctggagggcttgcagagctatgccgcctggagcttctcctaccgctatcagacgctccgaggtcacttgcgtcttagtggtgaggcggcctatatctctcgctcagcgtgggctttcatccagcacctctcttatctccaagggggctgggcggactttcggctctccctctggcatatcggggcgcattactggacctattatgggcgagctggcacgcatgcacttcgtccgcatagtgaggatggagggcgcctacagatacagcttactcccttcagtagcttagggccaaccctcctttatctcgatgcctatcgagcctgctcgcagaggtcgggagataatgtagcacgttcggctgtgagctatggcctgatgaccagtctccagatagagcgtgaggcaagtctgaggctacactatcggggacgaaaggatagccatcgcttcaagcttgagggggcgtatgatcttggcgcttggcaacctcgcctagccctcatctatgtccgtggagccgcatcttcgggctggactgtgcagggacgcatacgatggactccttccgaacggctacagctggatcttttagcagacgccttcgatgctccgagctgggatagccggctctatacgctgacgccgatgctccgaggtgagtatggtgcgactctattatatggtaagggagctgtgctcggagggcgggtgcgctatcgtctgagttcgcattggcagatcgaggggcgtgtacagtatgagcatcagcagcgtgatgtgcgcccgacgaagacactcttcgccctctccctgcgctatcgtggatggtaaagggcgctgtagatacgcgcctcttgggcggtttgatttggctaatagggcgattatctctacctttgcggggcaaaagtacatagtactcagccgagtaagatgagagttttctctcactggtcctatagctcagtcggttagagcacctgactcataatcagggagtccttggttcaagcccaagtgggaccaccactatagtaaggaagcgaaatggagtaagtgatcgtcgatcacttactccatttcgcttgtatttgcctctcttacatgtagaccattgcaagccctcatgctttcctcttctcgtgcgtgcgttacgtctgatataataatgctaactttgtggcttcttaataagcaaaccgtagagttaagtaacatccttcaatgagagaaatagtactcaaggggctgaccttcgtgccctatattgatgccaagaccataggccaggcagtcaagaagctcggggaacgcctgaaagctgactttaaagatcgtgacccgctctttgtctgcatcatgaatggctcattcatgtttgcctccgagctcatgtacgctatcgacgaagacttcgaggttgcctttgctcgctatagcagctaccaggggaccaagagtacctttgagctcaaggaagtgatgcctgtgacgcagtccctcgaggggcgtgtcgtcgtcatcgtcgaggacctcatcgacacgggcttcaccatgtacaatctacagaagcacttctatagcctgggcgctaaggaagtccacattgctgcgatgctctccaagcccgaggccttgaagtgtgacgttcacacggactacgtagctatggagatcgagaataagttcatcctcggtcatgggcttgactacgatgactacggtcgcatgttcagagatatttatcaactaaaagactaatcatactttagagacaacgatgcttaatttagtgatcttcggagcaccaggctctggcaagggaacacagagtgaagtccttatcgaacagttcgggttcgatcacatttccaccggcgacctcctgcgcgcagagatcaagcagggtagtgagctggggaagtctgccaagagctatatcgatgccggtcagcttgtccccgacagcctgatcatcggcatgatcgagaaggtactccaggagcgccagcccaagaaggggcttatcctcgacgggttcccccgcactgtagctcaggccgaagcgctggatgcgctctacgccaagcacgggactgctgtacatgctgtcctggatcttcaggtcgccgaagacgaactcatccagcgcctgctgaagcgcggtgaagagagcggccgtagcgatgacaaccttgagaccatccagaagcgcctcggtgtctatcacgctcagacagctcctatcgctgagcactacgctaagaagggagtgcaccatgtcatcgaaggtagcggcgctatcgctgatatcacggcacgcatcgctaaggtcgtcaacgccctgaactaaggacaagaccaccagcatatagcccagcctcattggttggaggaaaaggcatagtgcctggagcgtggcgcttctcacccacgggtgaatcggctgaccagacttcagacacgtgcctttccttatttttgtaccacattaatcatagaagacgagagccactatggcagaatcaaactttgtagactacgtcaagatctactgtcgctcaggtaagggcggccgaggctctacgcacttccgtagagagaagtacatccccaagggcggccctgacggtggggatggcggtcgtggtggtgacatctatatccgcgccaatgagaactactggaccctcctccacctgcgctatcagcgccacgtcatcgcgacaagcgggggcggcggcggtagaaaccgctccacgggctgtgatggtgaggaccaggtcatcgaggtacccgtaggtaccgccgtctatgatgccctcacgggggaattcatcatggatctcaaccgccacgggcagcaggagcttctcgtcaagggtggtcgtggtggtaaggggaataccttcttcaaaacgcctaccaatcaagctccacgctatgctcagccaggtgagcctgctcaggagcgtaccgtcatcctccagctcaagatgctcgccgatgtcggtcttgttggtctccctaatgcagggaagtccacgctcctctctgtcatcactgcagctaagcccaagatcgcgaactatcccttcacgacgctggagcccaacctcggtatggtgcgctatcgtgatgaccgctccttcgtcatggcggatatccctggtatcatcgagggtgctgcagaagggcgtggcttaggcttgcgcttccttcgccacattgagcgcaatgctctgctcctcttcatgatcccagccgatacggagaatatcgccgccgagtatcgtctcctcctcagtgagctggtcaagtataatgctgagctcacggagaagcgtaaggtcctctgcatcaccaagtgtgacttgatcgatgaagagatccagggctggatcgttgatgagctacacaaggagctgcccgcagagcttcctatctgcttcatctccgcggctgctcaccaaggactcaccgagctgaaggacctcctatggcaggaacttaatcgtgagacgaagcaccgcaccgagtctatcatccagcagtctatcgacgtcacgagcctcacctttgatgatgatgatgatgagcttcccacccactatgatgtagaggatgaatatgaagatggatgggacgacgaagatggcgacctggagttcgattgggacgatgtcgagatcgaagccgatgaggctatcgaggaatagctagccgtcgccgataactaatcatacgttacagagggcgtctctgggtgcattcccagaggcgccctcttgcatttctatatggacgcaacgtgatgtttgggattatattaggtattggctacctttagcatcgtgagtgtacgctgaaaatgtcacgactcatccctctgcattatagattatgagtgataagttctgtgagcatagacacaaagaggatgccgaaaatcttagatagagtaggcttagaagaataaccatcatgaaaccgatgcaagaagttatctataatgaagacacactgattcgggtgaaggagggccgtgtgacggtctatcgagttcatccaacagatagcgtaaagggcacactacgagagctctcggagcaacatggctttgagtatcagaaggaatggaatacacggagctttggcgctaagctgatcgctgacttcggaggtaagacagaggctctcatcgggagctacctgattcgtaagatagagggaggagcaatcgaagtgtatcgtatatgtgatgcggttaagaacgaactcatccgaatttccgaggagctggggattgataccagtggctctcttgtagagcttgctcaaaatatcattgcggaagttaatagagtccccgagatagatgagcctgcactcgttaccattcctcaagctacgcaccctctgctgcagaagcttctgcaggatatacaagacttctttaaaacagtgcatacctttaccttctataatgaggcgagcttacagctcaatctctccaactaccttatcaacacagggcactacgcaagcatagaagtagagtatctgatagtatctccagatgaagttgaggggctgacgtctaagcgctgctttattgatatcgttgtaaagaatgaatcaggggaatatgctcttcttgagctgaagtatcccttgtatatccccgaaggagttatcacttcacgtctaggggctaatattaagccagagatctatgcagtgaagcaaggagcacagaatgtagtacgctatcttttctggaaggatgtgaagcgtatagagtatttcagtagcctctctaaagatgctgttggcgggattgcactcctcttgacaaatgactcgatttattggactgctcctaagagtgatggcgatacgatggctctctatcgagaattctctctcaaggcgaggcaatctaatctcagttctaagagccgacgctggcttgaacgaaaagaaacgaatgaaaataagggagggaaagtctcattgagtgagaagtatccgggttttgatttggagaaagcttatcctctttactgggggactcctcttgcaccaatcaaggtaggggagaaaaaggatttgatcttccagccctgctttgtggtcgttgagaagtagtcttctaccgacaggctctattagaagagggggcgtctctggggctattcccagaggcgccctcttgcattttcggatatttatactacttttgcactgggtaagtcctatacgaccagctccctttgactcccccagggcttgatcgcagcaagggtattaggttgtagcggtgcgatatagatcgcttacccacctgcctctttagctcagttggccagagcacgtgatttgtaatctcggggtcgttggttcgaatccgacaagaggctcaaagaaagaaaaggggatgtgccaatcgacacatccccttttctattgccttttaatatgagatgatgatatctcggtctgcatagaattaatccgcctatgacaagcaagcattacatactattattaagtggctgcctactcctcagtgcaagtgccgaggcgtcggtagacaagctccttcctcgcccccagcacctggagatgcacgcagggaagtgcagtacgatccgtcttaagcccgaggggctgtatctacaggacgagctgaaggaaatacttcagcggaacggctgtgccatcgattcgcgtagccccatcgtggtgcgcacctcgatcgtgccctcgcttcccaaggtttatttcaataaggaggaggcctatcgccttcgcatcggagcagatggtatctacgtggatgcactcgagcgtatcggcttgtatcgtggcttgcagaccttagagcagctcctcatctcggcagagaagaagggcgagctggaggcgtgcgacatcatcgactggccttccttccgcatgcgaggccttatgcacgatctcggccgcgcctttatccctatggaagagctgaagaagcaggtacgtctcttggcacaatacaaggtcaatacgctacacctgcacctcaccgagcatcaagcatggcgactgcagagcaagcgctatcctcagctgacggaggcacgccacacgacgcgtatgcctggcaagttctacaccctctcggagctacaggatttggtacgcctgtgcaaggagctacgtatcacgctcatccccgagatcgatatgccgggtcacagctccgctttctcgcgagcgatgggctttgatatgcagacgcccgagggtaagcgtgtcgtcaaggagctcctcgcggagctggccgagagcctcgatgtatcttacattcacttgggtacggatgagacggacttcacggataagctcttcgtccccgagatggtcgagcacgttcgttcgcttggtaagaaggctatcgcgtggaatcccggctggcccttcaagagcaaggaagtcgacctcctccacctatggagctcaaagggacacatcgtgtatggcacgcccgccatcgatagtcgctaccattacctcaatcactacgacctcttcgccgatatccagatgctctacagcagcaagatcctcggcgttacggcgagcaatacgaacgtgatgggggcaatactcgccgtatggaatgaccgctatgtggagtctcctcgcactatcatgcaggagaatgccgtctaccccaacatgcttgctctggccgagcgcgcttggcttggaggcggtgagggatacttcaacgctccgaccgcagcgctttctcccgaagcgagccccgagacgcgagaggcttttgtggacttcgagcgcagactcctgtggcataaggatcgcgtcttcgccggtgagcccttcccctatgtggcgcagagccatgcccagtggtatgtcagccccgtctatcccaacggtggcgaccttgcagcctcgtacctacccgaagagcagtaccttaagcagatgaaggcgcaccagtatgctccgcctgccgaggtgggtggagaagcctacccctaccagcgcaccagcggaggttcgggtgtctatctccgtcacacgtggggagatatttgctacggcctcgtccccaacgcatcggagaatagcaccgtctacgctactgcttgggtgcacagcgatgccgccacgacggcaggcctgatcttcgagacgcagaattatagccgttcggaggcggacgtagctccccagcaaggcacgtgggactataagggcagccgtctgtgggtcaatggagaagctatcgcgcctccccgctggcagaatgctgtcgggcagcgcaacattgatcttccccttgccaacgagaacgcagcttcgcgcccacccctacagatccagctgcagaagggctggaatcaaattctgattaagctaccgattgggcgcttcacgctccccgagattaggctgaataagtggatgttcgccgcagcgatcaccacgcccgacggcagcaaggctttgccgaatctacagtacgccaagcccagcctcaagtaggcgcttcggcctcggctcatttagcacaagagggtgcaagggaaggatacttcctttgcaccctcttttcttttgataatcaaggggatgagatctccgtatatacggccggaaacttccgtatatgcgcagggaaattttcgtatatacaaaaataaatttccgcatatgcgaaaaaatatttctgcatatacggaaatttatcgccgtgcgcacagcgttttttcgccttgctttcagaggaaaggggcgggggattgagcgccttagcgaggggcgaaaagcgagagaaggatcttcctcctcttctcccccagcgaggctacacggggagcgtccagtgcgtgcgcaggatgggcagcgcttcggagagctcttgcatcgagtcgaagacgagatgtgcgccttcgtcagcaagagcgctgtcggggagcaagcccgtattcaccgcgatggtgaagatgcccgcagcgacggcagcccgcacacccatgggggcgttctccacgacgaaggcctcggcagcgcttactccagccttctccaagcccatcaggtagggctcggggtcgggcttgccacggcgcacatccttgcccgtgaccatgagatcttcggagaataccttggggaaggcttcatccagccgccctaagagcgaagcttgcgaagagcctgtgacgacgagacgctctacgtcggagagttgggcgagtaccagctcgacaccagggagtgtcttgcccgaattgtactcattgaagagctgtgtcttgcgctcatatagccacttcgtctcctcgggggaggcatcgcggccgagagtacgctggtagagtagcttgatcgtgtagccacctgtctggccttcgaaccaatagacatcctcttcgttcatctgcaggcctacctcgtgagcggcttgcacccacgaacggcagtgcgcgggcatcgaatcgaagagcacgccatccatatcgaagagcgcagcggagagcgtagggaagggtgcgcagaggccttgctcggcgcggtaggtgcggagtgccttgaggactccttcggtgcgtgcagccttattctctgtcacgtacttcacctccttcctgagctggtctggtcttatgccctaagagcttatcgacgacgagggctatggcgccatcgccggtaacattacatgcggtgccgaagctatccattgtgatataaagtgagatcatcagcgcctgctcctcgaccgtaaagcctaagatggactggaggatggccagcgccgccatgatcgcaccgccaggcacgccaggagctgctaccatcgtcacaccaagcaggaggatgaagtgtgtgaacatacctaagtcatacgtcccgccacgcatcaggataagagcaagagcgcaggagacgatcttcagcgtactgcccgagaggtggatcgtcgcgcagagaggtatggtgaaggaagccaccccgtcgctgacgccattcttcttcgcttgggcaagtgtcacggggatcgtcgctgccgacgaagccgtacccaaggccgtgaagtaagcgggaagcatattgatgagcagacggatcggattcttcccctgcaccagccctgcgatagtgaactgtagcagcagcaggaagatgtggagcacgaagatcaccccgatgatcttgatgaagaccacgagcacgccgacgaccttgccactgctcgccatctccatgaatatcccgaggatatagagtggaagtagcggaatgatgaccttctcgatgacgcccgagatgatatccttgacgtcgatgatcacgttcttgagcgccgtagactccagatgtgccacaccaaggccgaggacgaacgccaagataagcgccgtcatgacacccattacgggaggcatagcgatggtgaagtagggcgtaagagcttcggggcccgcttgtagctggtctacttgccccgcatcaatgagctgcgggaagatggcattccccgtgaagtaagccagatagcccgagaagattgtagagccataagcgatagctacggtcagtaggagcatcttccccgcgctatggccgatgcccccgatagcttcggctacgagagcgacgatgataagcgggatggcgaagtcgaggaactgcgagaagatcgcattgaaggtcaggaagagtcgcgtcaccccatcaggtacgatgagcccaaggcctatacccagggcgatcgctatgatgatgcgggggagcaaactgaggcgtagagctttcattcgctgaaaagagataagggttagtgtagttagttagcttatagtgaaagaccctactaagataagcgataaagcaatacgactggcatacatcctctcgtaggggagggggtataccagtcgtcttgtcttaggaggtcatgatcactccgtgtgtagtgttactgtctattctgtcgcttgcgctcggtctcatcaaggatgatcttacgcatacgcatcgagacgggcgtcacctcgacatattcgtcggggcggatatactccagcgcgtcctcaaggctgaagactacgggaggagccaatgataccttatcatcgctacccgaagcacgcatattcgtcagcttcttgctcttgcagacattgacggcgaggtcaccttccttcgtgtgctcaccgacgacctgaccagcgtagacttcttcctgtggagcgatgaagaagcgaccacggctctggaggttgttgagagcataggcgtaggccgtcccggtctcgagagcaatgatcgagccgttgttacgacgctcgatgtcgcccttccatggctgatactcgaggaagcggtgggcaaggacagcttcaccagccgaagcggtgaggacgtagttgttgagcccgatgataccgcgtgaagggatgtggaattcgaggaacgtacggtcacccttcgtctccatcatcgtcatctcacccttgcggcgcgtgacgacgtcgatgatcttgctcgcagactcctcggggaggttcaccgtgagaagctctatgggttcgtggggggcgccgtcgatctcgtggatgatgacctgaggctgaccgacctgcagctcgtagccttcgcggcgcatggtctcgatgaggacagagaggtggaggacgccacggccgtagacgatccagctgtctgcggtctctgcaggctcgatgcgcagggcaaggttcttatccagctccttcattaggcgatcgtggatgtggcgggaggtgacgaacttcccttcgcgcccatagaagggcgagttgttgatggtgaagagcatgctcatcgtaggctcatcgacagcgatggtctcgagcgcttcgggcgtagctacgtccgtgagggtctcaccgatctcaaagccttcgataccgaccagtgcacagatgtcgcccgaagagacgctatcgaccttcgttcggccaagaccttcgaagatattgacctccttgatacgcatctttgcgatcgagccatcacgcttgcagagggctacttcctgcccttcgctgaaggtaccacggtgtacgcgacctacggcgatacggccgacataggaagagtagtccagagaggtgataagcatctgtgctgggccttcgatctgcgtgggagcggggatttgctcgaggatggtatccaatagggtggtgatatcttcggtaggctgcttgtagtccttgctcatccagccctgcttggccgagccatagatggtctcgaagtcaagctgctcttcgctggcgttgaggctaaacatcaggtcgaagaccatatcctgtacctcttcggggcggcagttgggcttgtcgaccttgttgatgactacgatgggcttcagtcccatctcgatggccttctgcaggacgaagcgcgtctgaggcatagggccttcgaaggcatcgacaagaagcaggcaaccatcggcgaggttgagtacgcgctctacttcgccaccgaagtcggcgtggcctggggtgtcgatgatgttgatcttgacgtccttatagcggatgctgacattcttggagaggatggtgatcccacgctcacgctcgagatcattgttatcgaggtacgtatctacttcggcagccttatcatctctgaagagcttaccggctaaaagcatcttatctaccagcgtcgtcttaccatggtcgacgtgagcgataattgctatgttgcgaatgtcttgcatctgtttcttataagttcatctattacgggcacaaaggtagtcaataatgcgcacttatggggggatttctgcttctcggcgcatagttttttgcgggtgaagcactcatctctcctcacgaaagaccttgctttctctcccagtaaatcggctatcgacattgctcgcaaaatgacttcatgctgtggataggaggtgatagtattgaggggactttgcgaccagtactgctcggcgaatggaccagtactggtcacatatatgaaccagtactacttcgcgcttcaaccagtactggtcacttcgctgaccagtactacttcgattttccttttcgaaaggaggcgactaacacgcactacagtaggtagataatatggtataaggctgactccccgaaatcgggagtcagccttatagcatgatgtaggagatgaaggtccctataggaggggggcaaagaggcgcatgaaagattctgcaaagcggaccattcgcccacgctgctcccactcctcgtaggtaaggaggtggcaggaggtcttgtcttggtcgaagagcgtacgcaggcgcttagctgtccccgagtcgtagatgatccctgagatctcgaagttgtgctccaggctacggaagtccatgttggctgagccgatagtcgctatctgatcgtcaacgagaaggagtttagagtggaggaagccgtcggtatattggtagatctttacccctgcttcaaggagctgtgtgaggtaagagttagcagcgaaggttgtcaggcgcgagtccgtcttgagagggagcatcagctcgacctttacacccgcaagagctgccgtgataagagcattgttgagattttctgtcgggaggaagtagggcgtctggatgcagatgctatggctggctcgcgagatcatatagatgatcgcttgctcgatagtgcgccagtggctaatcgggccaccttggacgaactgaaccgaaggagaatactcgttcggctcagtcgcaggatcaaagtagcggtctacgttgatgaccttgcgtgagacggcataccagtcgatgaggaaggagctttggagaccagctacggctacccccgtgatgcggaagtgggtatcacgccagcgtccgagttctgagcccgtaaggtagcgctgggcgaagttcatcccgccgacatagccgatggagccgtcgatgacgacgatcttgcggtgattacgatagttcaccgtggtggagagaagagggaaggccacacgcataaaagcgtagacctggatccccgcacgtcgcaggcgcttccagtaggaggaggggacgttgtatgagccgaggtggtcgtagatgatgcggatggtgacgccttcctcgaccttgcgaaggaggatgtccgtaaggcggtcgagtacgtcgtctgccccgaagatataggcttgcaggtggatgtattcctcggcttgctccaggtctgcgaagagagcttcgtacatgtccgctccccaggcatagatatcgagggactggagctggaggagggggctgtcggagtttcgctcaacgagctcgatgagtcgctggtgttcttctgtggcttgccgcttcttcagcagatgcttagggagggagagtcgctgcggcttgagcatgagtctccggtagaagcggcggttgatgctattcagacgcttctggtcttggccgaagacgatatataccatgatcccaaagacggggatgagcccgacgatgaggatccatgcagaggccttgagcggattgcggttctcactgagtaccgtcccgatgacccctaataccgtcagtgtataggcaatgataagccaagaggagagctccatagcgaggtgtggagttagttggtgacgaggagcttgtcctgtcgagagagtcgctgtacgtggtagctgcgtagagggcttcgtgctgggcctgagagtgggcgacccgtcccagagagcaggtcgaagtggctcttgcacttgggacagcgtagctcaagccccgagagctggagttgagtccaaggtgccggctcgacgggacaggccaagtcgaaggcatagtactcttcgcggtctatggcatggactatggccaggcctgcgagtcctgcacgcatcgatgcgatggtagagtgtgggatgagagctattcccccaggggagagtagcgtgcgatactgcgagagttgcagtggtacctcatagtataccgaagtcttggggagcggtgtctcggtggtggaggtacaggaaaaaaagagtagccccacacagagcaatagcaggtacttgctcatatcggtggggctacgagggagctagtagttgtaagggatcatagtgagcatctccgcgagcttctctaccccgtcattgagcttgctcccaatcatcttccgcataaagaaattgaggtcagcacggagggtgaggcgtagacgcgtatcccctggtgcaggctcgaggagctggatccagagggtcaggtcgatgggagactgctcggtcgccagcttgatcgtaccctcgggctctcgctcgatgatacggagcacgagacgcccagccccagggacgacgaaggcgcatctatcactatcgataggctcgatggtgatcttctcacgtgcttcttcggggagacggtcttggatattagccaggccactcaggtctgagagtcgctggtatactcgggtacgaggtgcggcgatagccttgatagagcttacgtagtcggacatgaattagtcggatgatgggataatggtgcggggcttacttctttccggtccaagcggcaggatccttgcgccactccttgaggaggacttcgtcgtcagccgagatgtagcccgtagcgagtgcttggcggatgacggcatcatagcaactgagggtcacgaggcggacgtcagcctcagcgaaggcctgctctgcctgagggaagccatgcgtgtagactgcgaccataccgaggacagagcatcctgcacgacgaatagcatccacagcctttaggctgctaccaccagtggagatgaggtcttctacgacgagtacacggcttcctgcgggtagctcgccttcgatctgattacccataccgtggtccttagctacggggcggatgtagacgaaagggagacctagcaggtcggcgacgagagcaccctgagcgatagccccagtagcaactccagcgacgacgtcgggagcatcgaactcacggcggatagcttcggcaagctccgtcttgatcagcgtgcgtacctcagggtaggagagggtgacacggttgtcacagtagataggagacttccagccagaggcccaggtgaagggagagtcgggctgaagttttacagcctttacctgaaggagagcttcggcgatacgttcttgggtggtgatagcgctcatggggattgttcttttataggagtgagttagatctgtaggaggaagggatcggcatcagcccagacggggaatttctgccgaaggtcttgaaggggagcgtagtcgagtgtcgttgtgatgacagcctctactccttcttcagcctcgataagagccttgccacgagggtcaatgatgacagagtcgcccgaatagacgaggtggttaggatcttcgcctacacggttgacgccgatgacgtagctgagattctccatagcacgggcacgaaggagggtacggaagacctcacgacgcgggcgtggccagttggctacagcgatgataaggtcatattcgttcgacacattgcgacaccacacggggaagcgcaggtcgtagcagatgatggggaggatgtgccagcccttgaatgtgaagatggatcggctggtagcagagctgacgaatttcttctcccctccaggagcgaagaggtgacgctttgcctggagctgtaccttcccatcgggctcaatgaggaagaagagattatgtatgactcccttgacctcactgaggtagctcccagcgagagcgacattgtactcgtgagagagtcggaggagagtctggtagacttcgccttgctctcggtctgcaagcttcgctgcttcgcttgagaagcccgtagtaatcgtctcggggaagacgatgagatcgctcgtcgcagcatgatctcggataaggctctcgatgagctggaggttagccgagacatcattccagtggatactgcactgtactgcgctgactcgtaggggagcagggaagctatttgccataagacttagggagtgaattgctcgggatactttgcctgggacttatcgtatcgactacgtatcgtcgccagatcttgctccatatcgcctgtggggtagaagacctcgaatataccgagctccttcttgccgtagtcaatgacggcgagctcgatgggaaggcctgctgcaacggcaatatggtagaagccactcttccacttctctcctcgagagcgtgtaccctcgggggtgatagcaaggtgaatctgccccttctgtcggagctgctcttgcagacgctccacggtctgggtgcgctccttacgattgacgggaataccacctaaggctcggaagatagagcctaaggggaagaagaaccagtcgctcttcatcaggaagcctgagtggaagccagcggcccaagaatagagaagcccgaggggaaagtcgtagttgctggtgtgtggagcgacgcagatgacactcccttcaggctgcttgccagggtgggggatgaccttccatccaaagagacgaagcaggctctgagctattttcttacgcaattgtatagggatactatgggatgaagtcgagcgctatagaccttcgacgaagtcgtctagacgctctgagaagctcgcgaggttcgtgatgatgtagtgacgaaggtctctgtagtaggccttcacgagctgagggttatgcttgccgctggggtgggtgacgcggcggagactgtcgtcggtgaagaccatgatgtcgtccatcaggtcttcgatctcagcctgcatcgcttcgctcccagagacggcacggatgataagagcctcgtcaaagaggcgcatgacctctgcgatgatctctttcttcagggttctttgacttgccataatggtagagtatgtgaggagagatacccctcatatagggcaaagatatggattataggcttagcttgcccccttctcttgctcactcttctccgtgagcttaggattgaaggtcggtagctggatatgcaggacgactgcaagcactcggaaaatgaacactgagatggcggatatgaactgcacccactcgatgggtaggcttgagtagcgccccatgaggacatagatgatcgatccaaggacgcaggccgaagcatagaagtctgtacggaagatcaggggtgtttcgttgatcagtacgtcgcgcagaagccctccgaaagagccggtgactgtccccatgatgacagcaacccaccaggggaagcctgcggcataggacttcgctacacctacgaccacgaagagtccgaggccgatggcgtcaaagacgaagagggagtgattgaggcggacaacttggcgtcggaagatgatcgtgaagataagtccgagagccgtgatgatcagataggatggttggatgagccagaacggcttgatatctaaaaggatgtcacgtatcgtaccacctccgacagcagtcacgaagcccacaacgtaggctccgaaccagtctagccccttccccgctgcgagacggataccactgatggcaaaggccagtgtgccgaggtaatcacaccaattgacaaagtcattgacatcaacaagatgagcaaacttcatagcccgtgatctccttgcttattagtaggattctgcatcagaggggaagctacgctccttgactgcggtgatataagcccctgctgcctgcttgatttcctctccgagtgaggcaaagcggcggagaaactttggggtgaagcggtcttccataccgagcatatcctgtgagacgaggacttgtccatcgacaccgctaccagctccgataccgatgacggggatctgcagggcctgagctacacgtgccgcgacagaggcgggtaccttctcaagtactacagcgcagcaaccagcacgctccagcccgagagcttcttcgaagagcttgtctgcggcagcaccttctttaccctgaagtccatagcctccgagctgatgtacagattgaggtgtgagaccaaggtgaccaacgacgggaatacctgccgctgtgaactggctgattgtactgaataggtgcgtacctccctcaagcttgacggcatctgcacccgtctccttcatgatgcggatagccgaagcgagagcggtctcaggactgatctgatagctcccgaagggcatgtctacgacgacaaaggcgcgctggactccacggactacacaggcaccatggtagatcatctgatcgagagtaataggtagggtcgtggtatggcctgccatcacattggcagcagagtctccgacgaggaggatatctataccagcagcgtcgaggagacgtgccatcgtatagtcgtatgctgtgagcatcgagattggctcaccctgagccttcatagctgccagacggagggtcgtcaccttcttcgtctcggcttggtgttgagacacttctttattgatataaattgaggggtaagccaccaccctaatccctggaacgggatagggtggtggcctctgtgattatacttctgtggatatagagagtccgagagtagcactatgtactactcccattcgatggtgctgggtggcttggaggagatatcgtagacgacacggttcaccccacgtaccttgttgatgatctcattggagaccttagccaggaactcataggggaggtgagcccagtctgcgctcatcgcatccgtgctggtcacagcgcgtagtgcgatggtgtactcataggtacgctcatcacccatgacaccgacagagcggatggggaggaggatcgcaccagcctgccatacattgtcgtacagctcccactcgcgcatcatcgacatatagatgtcgtcagcattctggaggatctcgatcttctcagccgtgatctcgccgaggatacggatacctaagccgggaccagggaagggctggcgcttgatgaggtgaggctgcatacccatctcaagacctacgcgacgcacctcatccttgaagaggaggcgaagtggctctacaagacggagcttcatacgctcggggagcccaccgacattgtgatggctcttgatgaccgtacccgtgatgctgagggattcgatgacgtcaggataaatggtcccctggccaagccacttaatgtccttgagcttgtgtgcctcttcatcgaagacctcgatgaagccacgaccgatgatcttacgcttctcttcgggatcagtgacaccttggagagctgagaggaacttatctcgtgcgttgacgccgatgacattgagacctaagtgctcatagtcacgcaggacattctcgtattcgttcttacgcaggagcccatggtcgacgaagatacacgtgaggttcttgccgatcgccttgtggaggaggactgctgtcacagaggagtcgacaccgcccgagagagccaagatgaccttgtcatcccccagctgggcacgaagctcagccacggtgctctcaacgaaagaggctggagaccagttgccacggatacccgttactttgaggaagttatcaaggatcttgagaccttcttcagagtggaatgcttcaggatggaactggaccccccaggtacgctcgccatcaatacggaaggctgctgcctctacgtcctcagtgctggcgatgatacggaagcccttagggagcgtggtgatggtgtcaccgtgggacatccagacgataccgccaggtgtgataccctcgaggagcttatcattctcgtggcgtagcgtgaggtgtgcacgaccatactcacggctatcgcagggctctaccttaccaccagcttggtgaacgaggctctgtgctccatagcaaataccgagtatggggagacgcccacgcagggcggataggtcggtgcggaaggctgcttcgtcgtagaccgagtagggacttcctgagaggatgatccctgcgatgcccgtaagatcttcgggtaccttattgtagggtacgatctcgcaataggtgttcagttcgcggagtctacggcctatgagctgtgttgtctgcgagccaaagtcgaggatgagtatcttctcctgcatagttactgatggctttcttatttataagtggtaagaccaattcaagacaaagatacgaattgtgggagactctgctgatagcgctcgtatactcgtagttttatctcgtagaaaagagacattcccataggaggccgccgattcggaatcctataggaatgtcttgtggtgagggtaagcttctaagacggctgtctatccaaacgatagctaccatcagcctgcggtacagcgcggacgagccacttgtgtcgctcgcctccgccatcggagtagctgacctcgaagactccagaggcggagctggggcgcacgcttaggctactacaccagctggggtcaaagtctacattatcaatgagggtgtcgaagaatccactctcgacctcgcccaccgaagccaagccctcataatactgctgtatggtggccttagtgcagtagcggtcacgcagagccttgagttcagcttcgagctcgggcttcatcgcaaggtagtgagagatgtagcactcgtagaaggagcgaatgaagttgatcgggctcgtcatatctacgcttttagtccctgtaaagggattgctacggagcttatccccgtactcggagtgatgccactcgggggtgatgaagtcaatgagatacttatctccagacttcagtagatggagaggaatagcacgatagctttctccactaccaaagcttacctgataccagtcttgaccgagggcacgtacttgcaggctcccttcgctaccagatgcaaggtcttgggcacggataaatggatccgagtcggtgagtgctcttacgcgctccagcttagccttagcctctggtgtggcattagctaagatgagagagtccatctgagcaggttcatacatacggtcaaaggaacgaatgtactcagtgtagaagcgcttgagcatagcttcggggctctcggtacgctgcttctggactgtggtggtttgcttttgtttggtgcgcttttgtgcgcagcttgtagtgggagtagtgagccctaaaaagataagcaggctccatgtgagtaatgacttagacataataatgtggtgatatggttagatggaggggagaaacaaagcccctctcatagtgacaacgcacagagtgctatgcgcggtatgctttgtctctgcctatggattgccaggggcagagtattgcctcgaggaggtcaatcagaatgaagagcccgacacccatgagactcagtagcgctatcccagcgtacatgtctaggtagtcaatgcgcatccaggcatcggatatatagtagccaagcccctcggtcgtgccgtatgtctcggtaacaaagagcacggagatagctgtgccgatagctatgcgtagtgcagatagtgctgcggggagggctgcggggaggaggaggtgacgaaggagtccccaagtgctcgcaccgagcgagcgagttacagcaaaatgctcctcgggaatcgcaagcagggcatctcgcattgatacggctagctggaagagtatgattagcacgatcatcaccaccttcgttgcctccccaaggccacccaggagcatgactacggggaggagggctagcttaggtatggggtaggtgaagtagatgaaggtagataggatgcgccctactcgaggatagaggatcatcgagagggagaggatggctgagagtatggtcgcgatgagtataccccagccgatgcgctgcaggctcatcaaggtgtgagcaagaaggtcagacccattgaggtgagccatatgggtatagaccgcccatggggcaggtaagacttcgctacggataagtaggtagcctgccagccagagagcgtgcaagatagtggctccaagtaggagctgcaggaggtgacggctaaaggacttcatctaagtggcgtagttcttcctccagcatacttgcggtagctcctcggtggtcagcgaggagggttcctggctttcctccgatgagtagggtgcgctccgataacgtcgttgcctctacggggctatgggtgacgcaaagggtgggggtaggatagcgctgccacagctcgaggaagagctgacgagagcgacttgccgtcgctacatcgagggctgagaatgcttcgtcgaggagaagtagatccggcttcatgatgaaggcacgcgcaagggctacacgctggcactgacctccacttagttcgctggggtagcggtctaagagatcggtaagcgatagagtcgtgagaatctcctcttgcaggtcggatgagacgatacgtttgccgagtgcagctggcaggtgtatgttctctcttactgtcttccaggggaagagcccatattgctgggggacgagtgcaatctgatgggtacgggggctgagtggtacgcccgagagttgcagcgttcccttgctcgggcggataatccccgctaaggcgtgtaagaggctggacttcccgcttcccgatggcccgatgatcgtcacgatctctttccccaaactgaagctcacatccctgagtgcagtcgtcacttcacggcgctcgctatagcgtacgcttaggtcggagacatatagtagaggctcggacatagagggggatgtgatagaggagtggtgagctactccgcgatgattgggcggatcagcccctctgccgtgtagctctcaggtacgagctttttagccttcatccagctaaggatgggctgaaagtcctctgacttaggtgcggtgacctcagcataggtggggaggggaatctgcgaggcaagatccttggatacaccgaggagctgctctacggcggcagaccagtcctttcggggatgctgggccatgtaggcgacggccttgttgtatccctcgatgaaagccttcactgcggctgacttcttcgtgagtgcttcgtcttggaagagaagccccgtgatgcccaccgtgagtccattaggtacgtcaatagctaccagacccttggatgctccgatcgtagcgaagggctctgggagaatagcggcatccagctcacccgagctgagcatctctaagcgaatggggatcttctgcacctctacacgtgtgtagggtagcggcttgcccttagcatccacgagggcacgctcggtagcatagtcgataagcgtattggaggatagaccgatatgcttgcctcgcaggtcggagatcgcgtcgagctccttattgcgcccgaagaccagacggaagcccccttgacaagcgatgggaagagataccttcagccccttggaatgtaggagcatggctcccatatagtccgtgactgaggcatctacggagcccgtctgcagtgcagcatcacgctccatgggggaggcaaagcgcacgatctctatgggatgagtgaagaagccctgctgctcagctactgctatcggtaggtagtcaatagagggcatcaccccgatgcataggtgagtgctatctgtggggttgctcttccccttttgcgaacaagcgccagagaggaacatagcccctgtgatgagcgccataccgagcgcgaggaaaatccccgtgcgcagcgatcgtttcatatctattccttcgaattgagtttcttacgctccagtgctgcgaagtagcggcagtagggagctaatccacaggtcgtacactgaggcttgcgggctgtacatacatagcgtccatgcaagataagccagtggtgcgccttgggaatgaggtgctcggggatatacttgatgagggtgagctccgtctcgagaggtgtcttggaattggtcgtcagtccgatgcggttagatacacggaagacgtgtgtatcgactgccatcgtagggcggttatagatgaccgaagcgattacgttggccgtcttgcgcccgacacctgggagcttcatcagctcctcacgctcctcagggacttcgccctgatagtctgcgacgagccgctgagccatagctacaaggtaaccagccttagcgcggggatagctaacgctccgcacgagctcaaagatgtcctccacctcagctcgtgccatgatttcggctgtcggatactgtcggaagaggcgtggagtgatcatattcacccgcttgtccgtgcattgggctgagagaatcacagccaccagcagctcaaagggagtggtgtagtgtagctcagtttcagccacaggcatatgctcttcaaaccatccgatgacggcttcgtatcgctctttacgcgtcacagctcgtagttactctttgtgtagctcgtattaatgagcagccttgaactgctcaaggaagcgcacgtcattctctgagaagagacgcaggtcgctgactcgatacttgaggtttgtgatacgctctacacccataccgagggcatagccgctgtacttacggctgtcgatgccacagttctccagtacgttagggtcgaccataccgcatccgaggatctcaacccagcccgtgtgcttacagaagttacagcccttaccgccacagatgttgcaggagatatccatctctgccgatggctccgtgaaggggaagtaagaggggcggaggcgaatcttcgtgtcggtgccgaacatttcctgagcgaagtacagcagtacctgcttgaggtcagcgaacgatacgttttggtctacatagagagcctccagctgatggaagaagcagtgtgcgcggtaggagatggcctcattgcgatatacgcgacctgggcagatgacacggatgggaggctctgactccagcatcgtgcgagtctgtaccgaggaggtatgggtacgtaggagcgtaccagggacattgcgcacgaagaacgtatcctgcatatcacgtgcaggatggtcttcggcgaagttgagggcagagaatacatgccagtcatcttcgatctcaggtccttcggcaatagagaagccaaggcgtgcgaatatggagcagatctcctgctgaacgatggtcagcggatggcgtgagcctaatggagtggggtaagccgtacgtgaccagtcgatacccagaccttcgtcatctccaccagagctcagagaagcgcgtagctcgttgatcttgtccgtagccagcgtcttgagggcgttgaggagttggccgacctgtcgcttttcttcgttagggacggtcttgaattcgtcgaagagctgggaaacgagccccttcttactgatatatttgatgcgaaggtcttcgacttcctgctcagagtgtgccgtcagtgcttgtagctcggcagtgagttgttgtattctttcttgcatgaactaataccctttattttgaggtgtaaaggtagtgaattccacggaggtggcttgtgggccagggctccctcatcaaaatctcctcctcacctgcaagccgtattgaggctgggctgatttacagtcgactattgctctgcaagtgaacaacgattggcttgggggcaaaccactatttgtttcacatccgaacgaatagtcgtttggatatgaaaccactactgattcgatggcaaacaactattgctatcgctttgaccctctaccgtttcgcacatgctctctggtggctcttctttcccatagcatagctatataggagactgttgccgagagtcccgcccctacttgttgtgcaaggcatcgcatgcccagctccccgaaatgcctctccgaagagatacacaagcccttcgccttatcgcgagtatttctcttattcagccgtgggaaaagcatcgttctcgtgaaaggaaaagcaccttcacgtagtggttttcccctatctacgcacgtagtcttaaagaccaggcacgtaaatccaaatatccacgtacgtagatattagagccacgtacgtagcccaaacttatctgccattcgtccacaacttttacccctacgcggagcaacgacctaatataggtcacttcacaaagctatatagtaatcagcacaaagctatatagtaatcagtgcaaagctatatagtaatcagtacaaagctatatagtaatcggtgcaaagctatatagtaatcggtgcaaagctatatagtaatcggtgcaaagctatatagtaatcagtacaaagctatatagtaatcagtgtaaagctatatagcattcttcgccatcctatatagctctacctcacacatccatatacctattgagaccattgcgcaagaccacctcttcattactcgcacctccttcccttgaaaatcggagtctttaggctaagaagttcgaaggagaaaagtgcaagctgtgaagagacggccttgcgcaatggtctcaagtagatgcttgtctaaggcgtaaggataaaattaacggggcagggagggatccatcctctctgccccgttggctttattggtagctccccagtcgacagcggtgatgctggcgagctgaagaagtgatatcgagtacctctcttagtgggtggggttctgggtcagcttacctgggtaggcatcgatagcattctgtgggatgaagtataccacacgatagtctgtgggggcaatgtcctcacgctggtgatgagctccagggtagcgacgtacgagtgagcctccgttgcggaatacatcatagctacgctcagcttggaaggcgagttccagctggcgctccttgtcgatgcgctcggatgcgttcgtagcatcgaggctggcataggcggcaccagggatagagcgtgtgcgtatgatattgaggtccgtgagtgctgcgctatagttcccgagcttagcttctgcttcagctcggttgaggtacacttcgccgagacgagagatgacaggcgagtgcaggtggctattctcaccctcacgggagcacttcgtgatgtagaacatcgggtaggctctgttgagcttgatatataggtcgattactcctcggtaagtcttccccttataggtgatgctgtagatctcttgatttgcatctatcgcagtcaaggtgtaagactccgcctgccccgaatccttggcttccttggctatgatctgaccattggagcgagtgatggggagctgcacgtagttgaggtctcctgactcttcgctcttgatgaagcggaatacctccgtcttctcaggtgcgtacacgggctcaatgaaggcggcacgagcatctacgatacgagtgctggtagggcggaagtcatttcgtcccgtctcatcaagtagggcaaggtacttagcgctggcgtacatctcgccccagcccatacctccgatattggcatacataccaccgactccatagtagtggtcgtaaccagagtattcagaggccagacggcggacaacgaagatggactccttgttgctctcaggaaggagctgattgtacttcatgaagtcttctcgattgaggagcgaatacttcccactcgagatgaccttcgtggcatactcggaggccagctgagcatactgcctattgggctgctcataggtgccactcatatagaggtagaggcgggagagcaaagcctgagctgcacccttggatgcatagaagggcgtacctgagcgctcgggcaggagcgtctcagcctgcttcaagtcttcaatagcctgtgcataggtctctgctacggtagcacggtcggggagcgtgaacttatcgaagacgtccttgggggcactcttgatgataggtacaccgaggttcttctctgggtcctgatagtaggggcggccataggctctcacgaggtagaagtagaggaagccacgcacgaagtaagcttctcccacatgagccttgacttcctcgtcggtggaggtgccatagagctcgataatgttcgaggcctgaatgatagccttgtagctattatcccagaaggcctgtaggcggtagttctgtggggtgcggttgaaggagatgaactcaaagaaggcatctgtcgaggcgccacgtatcatgatgttgtcccccgcatactcgccgcagcgatgcatgacgtcactccaggtcttgagctgggcatacatcccgtgggtcatcccatcgatagcctcttctggatgctcgaggatacgctggctggacatgctccccttgggctctctgtcaatattgcaggctaccagtaggcaggaggacaccagtagcattagtatcttattcatatctgtatcgtgtagctagagtgagaggttgagcccgaggacgaagcgacggacaggaggatagacgctgatgcccgtcgtccccatgacagagccatcggaggcgggaagctcggggtctactcctgagtacttcgtcagggtaaagaggttctcagcattgaggtagatacggaggttctgtaccttcagctgaggaagggtgaggttgtagccaaggctgagagtacgtagcttgaagaaggagttgtcctcgaggtagcgagaagaggccttgttaccgttatccttgttgttgtacagggcgcgtgggtgagtggcgacgtcgcccttcttctgccagcgtgaccaacccttctgcagtgacatctgattgcggtcggtgtaggtgaggtcagagtcgagctcttggcgagagtagttgtagatctgtccaccgagagcatagccgaacgtagccgagaggtcgaactccttccagcggaggttcgtcgtgatccccccgaagaccttaggtgcagcagagcccagcttgtagtacttggcttcagcgtagttgctggtcgtgacgcgctctccgttagtcccttccttataccacatggggcgcccgtcatcaggatttactccagcccactcaggcatgtaataggtgtcgataggagagcctatctcgaggatgcgggaggcagagccagcgatatcgctcccgtcaccgatgatgacaggcttggcgatgtactgccctgagggatcatactgacggaagatgtcggtgagcttattggcgttgtgtccgacgttgaggtcaaggctccaggtgaggtccttgctacggatgatatcaccaccgatagctacctcgatacccttattggccatcttaccgatgttacggtagatgtgagtcacacctgtgaggctggtgacgggtacattatagaggatgttgtcggtcttcttggagtaaagatcaagggtaaggcgtaggcggtttgaccagagcgaagcgtcaagcccgatgcccgcagtataggtacgctcccaagtaaggtcattattcccgatctgagagatgagcataccgggctgagcgttgtagctggatgctatcgagtagaggtcatactgggggtagagggcggatggacggttaccagccgagccataggaggcgcggagcttcagctggtcgaaagccttgatcccaaaccatgattcgcggtggatgctccacccaccactgatagagaagagggtaccatacttggctcttgaaccgaggttggaggcaccgtcacggcggatagatccttcgaggagatagcggttgtcgtagctatagcgagcattagcgaagacggactgtactgcccattcagcgatcccacccttagccttctcgggcttagcggtgatgtccagtacctcaaagcctgggacaaagcccgtcccgttggcgctggttgacttaccccagtagtcgttgaactcataagcaagcaacccattgaggttatgcaggccccagctattatttgtgaggagcttctggtttgagtagcgacgagctacttgtccatgatactcggtgatacgaccttggacgctctctccaccattggagcgaggatcttcgtagccgtgacccgtgctgtggacgtacttgtagttattgactgaggagaaggtgagccaaggtgcgatacgaacgtcgaagtcaaggttacccatgaattcgtagtagctcccatcatagtggttccactgcaggtcacggaggtaattcgtgctgttgctatttacccattctgagtatttgtgggggacaagcttccccccagcgtcgtatgggctatcccaagggagcatcgagtacattgcagagatagagtattgtctatcctcagagttctgcattgctccgctgatcataggacgaatcgtgagccagctgagaggcttatagctggtcttcagacggaagttgtagcgcttgtagtcaaagcccttgacagcacccttctcatcatagtagcctaaggagaagagggagttcatcgtttcgctccccccttgtagggtgaggttatagtcctgagagacgccggtgcgtgtagccagcttccaccagtcgaagttgtcattgcgtagggctggtttccatcgagggaaggggatggtgctggcattgcctgtggaggcaaagtagtcgtagagttcggctccattcatcatgtgcaggttgccattggttagctggctgataccagtgcgcatagagactgaggtgcggagcttgcccgagcggctactcttggtcgtgactacaacgacaccgtttgctccagcagagccatagatcgctgtggaggctgcatccttgaggatcgtgaggctctcaatgtcctgagggctgagctgaccagggtcatcacccacgatcacaccatcgatgacccagagggggcgtgtgttcccgttgagggtggcttgtccacgtatcaccacggctgcgctcgagccagggcgtcctgatccaggtgcgacatatacgccaggggccttgccattgaggaggttagaaacggagggagtagtgatgtccttgagtttgctggctttaaggttaatcatagctcctgtgaggctctccttgcgctgtgtagtatagccgacgacgacgagctcaccgagggtcttggagttctcttttagctggatgacttgatccttctctatcgcctggatctctaaggtttcgtacccgacgcaggagatgatcagtgtcacccctggggaagcagacaaggtatatccaccatgcttgtcggagatgctcccgatacgtttgttgcctttgatgcggatacttgccccgacgatgggctctccagtcgtagcatccacgatgtgcccgcgtatcttacctgctacttgggtgagtgtgacaggacttgacgacggctcttgctctatggctgcatttgccgcaaggggcatggagcagagggtgagcagggagacaacgagtgtactccgtagccgagcctgacgagaaagtggtctttcgttcttcattcttcagcgtttttatggttggtgtaatgctttctggagggtaaatataggtcatttctataggatagacgaggtctctaaggtgatttgatttaataaaataatgaaggaaatcattagcttatcttccagcttcttaccttgtatagatgaagccatatataggggtagattctatccataaatggacctccctctcttcttgagcctgcaagaaggaggtataatattgtattgggaagagctgactaccactgagtggtcggaggctttttcttctgaggtggagagcactattttagaaggggaatattgaccagtactggtcactgagttgactactactggtcgcgacgctgagcagtactggttgcttagggtgaccagtactggttcgatcatcgaccagtactgcttcaaaaagcatcactcggaagaccgcttaggaataggggagaagcccaccttattattagtacctttgcgacctataatagataagcttgatactactcttggacgaaaagaatcttacaacccaagggcttcgcttcaccgtcgtaggaatgaacgatgagcaatgccccctcttctcccccgaagtacagcaactcatcgctcagcatcgagtcttctcgggggggcgtcgccaccgcgaactcgtcgccgatatacttcccgcaggtgctgtatggatcgatattattgttcccctcagtgcggtctatcaggagtatcgtgccttagacgagcccgtgttggtctttgcttctggtgatccgcttttctttggcttcactacgacactcatgcgcgagttccctgggcaggtcgcacagaccttcccctcctttagctctctgcagatgctcgcacatagcttgcgcttgccctaccatgatatgcgtgtcgtctcactgacgggacgtccttggctggagctggatcgtgctctcatcgagcgtgctgcaaaggtgggagtcttgacggataagaagaataccccagcgctcatcgctcagcggatgatcgactatggctatacgggctatcagatgcatatcggggtgcgactcggagggagccgagaggaagtctatagcctcccgctacatgaagttgtcggacgagagttcggtcaccccaactgcctgatcattgaagacccacagcccaccgcatacgatgctccgattggcctgcaagagctggatttcttccccctcaatggtcgtgtgaatatgatcacgaagatgccggtgcgtctggtgagcctgagtctgctcgagcttgagcgacgtcgtagcttctgggatgtaggcttctgcacaggctcggtatctatcgaggccaagctccgctaccctcatctcttggtgacctccttcgaggtgcgtcccgaggggaaggagcttatggaggtcaatagccgtcgcttccatgctccaggtattgactatcatattggagacttccttagccaagatcttgagtcgcttccccgccccgaggccgccttcatcggtgggcatggggggaagctcattaagtttgttgagcgcctcactgcgcttatgggagctgatggcgtgctcgtcttcaactcggtctcagaggagacactggcgctcttccgcgaggccatcgagcgagtcggttggcatatctcctatgagacgctccttatggtcgatgcccacaatcctatcactatcctccaggctaaggggaaatagatatcagcagagtagatgccgacacgttgtagctatgggctcataggtcgccccctgggacactccttctctcctcgatatttcttggagctctttgatcgtctcggggtagatgcttcgtatgatagctacgagctccagcggatagaggagttgcccgaactattggctactcatccttcgctccgagggctgaacgttacgctcccttataagcgagaggtgcttcgctatgtagacgcttgctctcccgaagtggagcatctgcaggctgccaacgtactttgtattgagcgtactccttcaggaaagctccatatcaccgcacataatacggatgtctggggcttctaccactcactggtccctcttcttggcgaggagcgacctcatacttgggtcttcggtacgggaggtgcggcctctgccgtactctatgctcttgagcaactcggtatcagctatgagcaggtgagccgtactcctcagagcggacagcgctcttacgaaagcttgacaagagaagaggggaaagcgacccctctatggattaatgccacgcccataggtcttcacgaaggagagtgcctccccttgccctacgaggctcttggggagtctcacctttgctatgatctcatctataatccctcaccgacgaccttcctccgtcgagccctgcagagcggagcaagagcgaaggatggtctcgagatgctacacctccaggccgataaggcttggcagctatggacagcgaatgaagaagaatagatatgccttggcccttgcgctggccttggcctcctgctcgacgacgaagtacgtcggggacgggagctacctacttacgaaggtcactatccaagtggactccctcgatcagacagagcgggagcagctcggtgaccttgagtccttccttccacaacgccccaatacaaagctcttggggctctttgactggacacttgggctctatagcttgagtaacccgaagagtaatagtttcctcaatcgtcagctgcgtaagtggggagatcctcctgtgctctatagcgcagaagaagctgagtttggtcgagccaacctcaccgcagcgatgtacaatatgggctacctcaaggctcagacgactctccgtgtggatacgactaaggccaagcgagctcgtctgatatacactatcacacctggtcgtcgtctacgcgtaggccgcttctcagagtccatccaggatagcagtattgtccagcatctttaccctcaagatacactcatcgagaagcgtcgcttccgtggtgagcgctatcgctcttatctccactcaggtgctatcctctctcctcagaatatgcaggccgagcaggagcgtatcactcagattcttcgtaatagaggctactataccttctctggtgatagtgtccgattcgaggtcgatacgctggtgccctcggatgtatgggtacgtagcgtagtccactcgcccgagaagacctatcgcatcggacgcgtgcggatgcgtcagatcgctcgtcatgagacgggtgagtccctgaagcaggcgcgtgatggtatcagcttcgatcttgatccgaagcactatatccgcccctcagagctcgctcgacgtatctggatccgtccaggtgcactctactcgatgcagcatacctcatctacctatactgctctgagcgaactgccaaccttgcagagcgtctcgatccagtaccacccagatacgctcgctacggactctgctgtcttggactgtgacattaccgctgcctccacccagacgaagagtatcggtggggatattgtcgggacgaactcctcagggaactttggggtgagctcttcgctgaacttccaaaatagcaacctcttccatggtggggagcagctccacctccagctacgtggtggctatgagagcctcggcgagcgccgcaatgaccacttaaactatggggcagaggcctcgcttaccttccctcgtctgctcgtgcccttccgccactcgaaggggccatcgacgatcctgtcttcgacaagcttacaggtgagctatgaccaccaccgccgtccagagttcagccgtgatatcttctccttcaagtggggctatagctggcacagccactacacgcccgcctatcgccatcagctgaaggtcatcgacttggatttccttcacttcggctatatcaatgaggacttccgtcgctcgatgccgctcatcactcagatcttgaactaccgagatcagtttgtccttggggcttcgtacctcttccgctacaactcgctcaatgactaccgcctctcgacttcgccttgggtacataacctacgcctcttcatccagtcgtcgggaagtctgctctatggggtatcggcactgctaaatagggaacgtgatacctacgggtcgtatcgcttcttcgagacgaactttgcccagttcgtcaagggggagattgactatagtgggcttcgtaagctgagtgaagggaatgcctttgcctatcatctggggctggctgtagcttatccctatggcaatagtcagtacgtgcctgttgacctccgctacttcgctggtggcgctaatagcctgcgtggctggtctgcgcgtagccttggccctggtagtatgcctcgctcagcaagccaatctatcttcgatcaggtcggggatatcaagcttgagatgaatgcagagtaccgtatgaagatccttggtcctctccagctcgccctcttcgctgatgctgggaatatctggacgatacgtgcctatcagaatcagccgcagggagacttccagtggaaccgcttctacaaggagatcgccctgtcgagtgggctggggctgcgctgggactttgattattttgtcctccgcttcgatgtgggggctaagctccacgatccacaggtggagaatggccgtccttgggtcatcacctaccaagagccaaagcagctacttgccttcaacattgctattggctaccccttctaattcgtagcatctcgcgctacgtacgggctaaaagcagagcgtcgcatagctccaccacagtggactatgcgacgctctcttattaatatggagtaagttcccttgaactacttcagtgcagcgagtgcagcttcgtagttgggctcctgcgtgatctcggggacgagctcggtgtagaggatcttgccagcctcatcgatgacgacgacggcacgtgccaagagaccagccagaggaccatcctgctgctcgaggccatagtgctccgtgaagcagttgtggcggaagactgatacgggtactaccttgtcgaggccttcagcaccgcagaagcgtgactgagcgaaaggcaagtccttagatacacagaggacgacggtgttgtcgagcttagaagcttcggcattgaagcgacggacgctggtagcgcagacgcctgtgtcaacgctggggaagatattgagtacgacacgctgaccacgcagatcctcgaggtggatctcactgaggttcgtcttcgtagccccgaagttaggagcggtagtgcctacggcaggcatttcaccagagaggtgtacggtgaggtcttttttgaaagtgactgttgccattgcttgttgtattgtttttgtctccttgctagaaaggtaggagggggttagcttatttgctcttataactatctggctgccggctatgttcactcgagcatgcgactacagtgcacgaagccagccatcttccagacgtaggacgaggtcgaagaggcttaggctcatgcagtaggtcacacagtctgcgaagcctgcttgctctagtcgtacatagtggtcactacttttgatgtactctgtacgagcatcgagagtcgctgcgtggtcctgccacaggtcgcgcaccatacgggtggtatcgtcacctgcgattgctctcgcttctacggtgaaggcgcctgcatagagcatatcctccatggaggcctgtcccttccagcctgcggcgagtacgacgacatcacggccggagcgctggcagtagtcgatggtcgcacgcaggttagttagtgccccgacgagaatctcctctgcaccatgctctcgagctatcgtgagggctcgcgtaccattggtcgtcgtgaagacgatctcacgcccgctgactaagtctgtcgtgtactctgcgggatcattgccgagctgggcgaagtcacagcgtacaacattgcgttcggccgcgatgagtgcacccagacgtttgcctgtctcctcagcctcttcggtcgaagccacagggagtattcccttagctccatgggcaaaggctgcgaccatcgtggtcgaggctcggaagatgtccacgatgatgacgatactattagggcggtggtagagcggatagagtttaggggagggacagagatagacttgcatagaggatgataaaatgaagctacctcccgcggatggtttacccacgggaggtagcgatgtgtatcgaaggtggagaggggttagataccgagctcctgacggatgatctggatcttctcgaggcaggcggcttcagccgcggggaggtcttccttagaagttaccttcccacgtacaccgatgtagaacttgatcttgggctccgtgccagagggacggatagataccttcgtcccgtcagctgtcttgtactggagtacgttgctggtcgtaggcatatcgagcgtgaagacctcgcccttgtcgagccagaggccctggagcttggcgtagtcgaggacctcgacgacggggcttcctgcgagagtcttgaggggattctcacggaagttcttcatcatagcttcgatctcttcggcaccgctcttacccttgcggactacactgacaccctggtccttgtagagaccatactctacgaagacctgctggaggagctggtagatagacatgccacggtcggctgcccatgcagcgagctcggcgaacatgcagcaggccgatactgagctcttgtctcggatgaagtcctctcggaggaagccgtagctctcttcaccaccaccgatgtagttcagcttgccttcgttcttgcggatgacgtctgcgatccacttaaagcccgtgtagcagtcgaagagtatgacgttagacttctctgcgatagcacggatgagctctgtggttacaatggtcttgacgacgtagtcggtaggctggaggaggccagcgtctcgacgattggcgatggcgtagtaggtcaggagggagcaaatctcgttcccgttgatgaggacgatcttaccctcctcgttgcgtactgctaccccgatgcggtctgcgtcagggtcggacgctaagacgatatcagcaccagtctcctcggcacgacggatagccagctcgagggctgcgggctcctcggggttgggagagtggacggtggggaagtttccgctgacgacatcctgctcagggacgttgatgatgttcgtgaagccaatagcacgcagtgcttcaggaatgatgcgtacaccggtaccgtgaataggcgtgtagacgatcttcaggtcgtggtggcgtgcgatagactccttctggggcgcagagagtgaagcgacacgctcaatgaagcgcttgtcgaactcttcgccgaggaagtgtatgagctcggggcgagcttcgaagcggatatcttcagcgcgcgtgatcttattgacctcgatgatcgtgttgcggtcatgaggagccagcatctgtgccccgtcagaccaataagccttgtagccgttgtattccttggggttgtgcgatgcagtgatcattacgccgctctggcagcccagttcacgaatagcaaaggatacctcgggcgtaggacgaaggccctcgaagagatagaccttgatgccgttagcagagaagacctcagcggtgatgcgcgcgaagacatcactattattacggcaatcatggccgatagctaccgagatttcggggagggaagcgaaagcctgcttgaggtagttcgcctggccctgtgtagcggctccgacggtgtagcggttcatgcgattggagcctacgcccatgatcccgcgtagcccacccgtaccgaactctaagtccttgtagaaggcttcgacgagctccgtggtatcttcagcatcgaggaggcgttgtacttcggcgcgcgtctgttcatcgtatccaggtgtcagccagccttgggccttggcacgtacctgggctaagaaggtgtcttgttccatgtgtccgttggatgtatgatgagagttgtattctctaaattgtgaataactactaacaaagataagacatttctaagggaaacgctacgcccccacctggcggataggtatccgtaggtgggggcgtagtgatatggtgttagcctcttcggctatggcttagagaggggaacccgtccagcccttagctgagagagcagcattgacagccgtggtgaggagctcgcccttaaccttaagggtgccacctgaagtctgcagtctcttgatcatcttgataagattctcctcagagattgttatgttcttcagcgtgatgctggttacactcgcattagctttactaacgatgtactgtagagcctgtgctgcggggatgttgtcaaattcaacagcgatagcgccagcattactatccttcagtaccacattcgttgcattgctgacagcgaacttggagagggtggcgttgcggaatgtgatatccttcagcttaggcttgctgccgaggtctgcattgagcttgataccagcggttggtgcggttgcgtagaggacttccagctccgtgctcttagcgaacgtgaagtttgagaagaagggagactggcagaagaacttcttcagcttaggcagattgtcgaagtcgcacttaccatcctgcagggttgcagtgcgcacgatgaaattctcgatgacgttgttagcgggaagcttgacttcgctgatgcgagaggccttctcaggtacagagccaaaggcatccgtcatctcggggaagtttgcgcccagctcccacgcaccaattccgaggttcttcagcttatttagcttggtgaggtcaaggctttcgattgagtagccagcgatgaggagggactccaggtccgtcagtccagagaggtcgattgccgttgcagtggccgtagcagaagagctctttgatacaaggatgagggtcttcaagagaggagaagacttaggaaggctgaggtttgtgatatcgtcgctctggatcttgagcttctctacgttcccattgataccgaggaggccattggtgccgacggtatacttcgtcttgtcagtagcgtccatcgtagcaccgaggatcttaagacccgtctggggctcgatgtagaccacagaacccgcaggtaccgtgaggacagcctgagagctcttgatcgcagtgacatccgcagaggcgtcagttgtgttggggtcggtagatactactggagcgggcttgggttcatccttcttgcggcaggatgtcgtcccgatgaagaggctggcaagtgccagaagtgcaagggatttcttcatttctgttaatgtttacgtttgtaaagcgctatgcgcctgatgttatcttttatcaaaggcaaagataaataaaatactgacttcgcaatagcgttgtcgcaaatgtgccgctctatagcccctgggagcttaatgaagcgccgacttcgacttgtgtaagctcctccctacacctaataaattatatgagtacgcgggtagagctataataggatgacgaagaaagctatatagctttggattgattcctaatatggctttgtgaagtgacctatattaggttgttgctccgcgtagggatgaaaagttgtggacgagtgctaggtaaatttgggctacgtacgtggatctaatatcttcgtgcgtggatgtttggatttgcctacttggtctttaagactacgtacacagacagaggaaaaccactacgtgaaggcgcttttttattcacgggaatgatactttctcttcctctgaataagaggaatccgcgcgataaggcgaagggcttgtgtatcacttcggtgaggtatatcgggtagctggacgtgcgatgccttagcactctaaatagaggtcaggactataggtaacagtctctttagagtaatgaagatgcagcatataggtccttactactgcgcacctcttatacggaggatcacctgtcggagtgcggtgtgagtcgctccgttgggaagagggtgggagagctgtggatgatacgacgtgtctccacagggtgatatcgcattctgccagccttttgcacgtctcgggaaaacctttggcgagcctaggtcgtttcactgatttacgttacctttgcggatataagtaatcaattcactaaattgaactattatggcaactgacaaagaacggttactgagcgaattccctgccattagcacacaggaatggaaggacaagatcgtgaccgacctgaagggagctgacttcgagcgtaagctcgtctggcgtaccaacgaaggattcaacgtcaaccccttctatcgtcgcgaagacctcgaaggtctctctacccccaaagtgatgcctgcagagtacccttatgtccgctccacgcgtatggacaatgagtggctcatccgtcaggacatcaatgtaaatgaccccaaggaggccaatgaaaaggcactggatatcctcaataaggggattacctcgctgggcttcaagcttcgtcgcgatcaggtcaacaaggaaactctggccatcctgctcaagggcattatgcccgaggctatcgagctgaacttctcttgctgcatctctgtagcagctcagctcgcaggcgaactggccgcttatctcaccgaagtaggagccgatgtagcacagtgcaagggctcgatcaacttcgatcccttcaagaagcagctcgtcaagggtatatctaacccccagtgggtggctatgtgcgcacagctcctcgatgctgtccgccccctgcctcagtaccgcgtcctcacggtcaatgccctcaacatcaataacgccggtgcctacatctaccaggagctgggctatgcactctcttggggtgctgagctcatcgacaagctcacggaagcaggctactccatcgaagaactgacgagccgtatcaagttcgtcttcggcgtagggtccaactacttcatggagctggctaagttccgtgctgcacgctggctctgggctgagatcatcggtgcctacggcgaccagtataagggtgacgcagctaagatccacatgcacgctgtcacctctacctggaacaagacgatctacgatgctcacgttaacctccttcgtacacagaccgaagcgatgtcagcgaccctgggcggtgtagactctctgacggtacagcccttcgatgttacctaccaggaatctgacaacttctccgaacgtatcgcacgcaaccagcagctcctcctcaaggaagagtctcacttcgacaaggtcatcgaccccgctgctggctcctactatatcgagcatctgacgaacgccctcgcagagcaggcttggaagctcttcctcgctgtagaagaagagggtggcttcgctgctgctgtcgaagctggtggcgtacagaaggcggtcaacgccagcaacgctaagcgtcacgctgctgtcgctgctcgtaaggaaatcttcctcggtacgaaccagttccccaacttcaccgaaacggctgcacagaaggtcgctcaggcagaagtaggtggtcacagctgcggctgcggtactccttcgatcgaagctctgaacttcgaccgtggtgcttccgaattcgaagctcttcgtctggctactgagcgtagtggcaaggaggtcaaggtcttcatgctcacgatcggtaacctcgccatgcgtctggctcgctctcagttctccagtaacttcttcgcttgcgctggctacaaggtcctcgacaaccttggcttcgctacggtgcaggaaggtgttgacgctggtctcgcagctggtgcctcgatcatcgtcctctgctcgagcgatgatgagtatgcagagttcgctcctgaggcgtacaagtatctcgcaggtcgcgctgagttcgtcgtagcaggtgctcctgcttgtgcagacgacctcaaggctgtcggcatcgagaacttcatcaacgtgaagagcaacgtcctcgaaacgctccgccagttcaaccagaagcttggtattaactaatcggtaaggagacagaagaaatgaaaccacaattcaagaacatagatattaagtctgcaggctttgcccagacttgccccgtcgaatgggcttcgaagcaggataacagctcagtatggcgtactgccgagcagatcctcgtcaagcctgtctacacggcgcacgacctcgaagggatggaacacctcgactatgcttccggtattcctccttacctgcgcggtccttatagcggtatgtacgctatgcgtccttggacgatccgtcagtatgcaggcttctctacggctgaagagtctaacgccttctatcgccgtaacctcgcctctggtcagaaggggctttccgtagccttcgacctcgctacgcaccgtgggtacgacgctgaccaccctcgtgtagtcggtgacgtcggtaaggctggggtatcgatctgctcgctggaggatatgaaggtgctcttcgatggtatccccctcaacaagatgtccgtctcgatgacgatgaatggtgccgtacttcctgtcatggcattctacatcaacgcaggtctcgagcagggtgctaagcttgatgagatggctggtacgatccagaacgacatcctcaaggagttcatggtgcgtaacacctacatctacccacccgaattctcgatgcgtatcatcgctgacatcttcgagtacacgtcgcagaatatgcctaagttcaactcgatctctatctccggctaccacatgcaggaagctggtgctacggcagacatcgagatggcttacacgctcgctgacggtctcgaatacctcaaggctggtatcgctgctggtatccccgtagataagttcgcacctcgtctgtccttcttctgggctatcgggatgaaccactttatggagatcgctaagatgcgtgctgcacgctgcctctgggctaagatcgtcggtcagttcaaccctgagaaccccaagagccttgcgcttcgtacgcacagccagacgtctggttggtcgctcaccgagcaggaccccttcaacaacgtaggtcgtacctgtatcgaagctatgggtgcagcactcggtcacacgcagtcgctccacaccaatgctcttgacgaagctatcgcactgcctacggacttctcagctcgtatcgctcgtaatacgcagatctacatccaggaagagaccctcgtatgtaaggagatcgacccatgggcaggttcgtactacgtcgaaagccttacgaacgaactcatgcacaaggcatgggagcacatcaaggaagtcgaaagcatgggtggtatggctaaggctatcgaaacgggtctgcctaagatgcgtatcgaagaagctgcagctcgtacgcaggctcgtatcgactctcgtcagcaggtcatcgtcggtatcaacaagtatcgcctcgagaaggaagatcctattgatatcctcgagatcgacaacactgctgtacgtgagcagcagatcgctcgtctgaatgatctgcgtaagggtcgtgacgaagctgctgtcaaggctgctctcgaagctatcacccactgcgtagagacgaaggaaggtaacctccttgacctcgctgtcaaggctgcagctctccgtgcttctctcggtgaaatctctgatgcctgcgaaaagatcgtaggtcgctataaggctatcattcgtactatctcaggcgtgtattcttcagaatccggcgaagatcaggacttcatcaaggctaaggctcttgctaagaagttcgctgaaaaggaaggtcgtcagccccgtatcatgatcgctaagatgggtcaggacggtcacgaccgcggtgcaaaggttgtcgctacgggctatgctgactgtggcttcgacgtggatatgggtcctctcttccagactccagaagagtccgctcgtcaggctgtcgaaaacgacgtccacgtgatgggtgtctcttcactggctgcaggtcacaagacgctgatccctcaggtcatcgaagagctgaagaagcttggccgtcccgatatcctcgtcacggctggtggtgtcatccctgctcaggactatgagttcctctacaacgcaggtgttgccgctatcttcggtcctggtaccccagtagcttactccgctgctaaggtcctcgagatcctcctcggtgaagaagcctaagcaagaggctcttctctatcattactttggtaaaggaagcgccagacctcataggaggtctggcgctcctctttttaattagcaacagtatgagctctttgcttattcccatttataagttgtttatctttggctcggtctttagagattaagtactaattatgagacgagaacaaatacgatctgtgctagatatggatggaagaagtgcaagagcttttttcatggcaggggagcggtattgtactatgagattgcctgctcctttttcttttgatcctattctaaggtttgtacaagataggatggctgataagagatatcgggaatggaagaaagagaagcgtagtgatccgagtcactatgactgctctagctaccagattcagatagctaagaatagtcatcttgcatatagaacgatctctttagtagacccctatctgtattacttgcttgtacgagaacttactcaggaagagaattggaagatgatccagcagcgtatgaaggtgctcagcgtcgattggatagagcgccttgcaatcccagaagagtctctccaggatgatgtctgtagtactgaggaaggagagcaaatctctaattggtgggatcgctttgggcagcattcgatagagctatctctagagtaccgctatatgctttgtgcagatattgctgattgttatccatcaatctatacgcatagcatagcatgggcccttcatgacagggaggttgctaagcgatctgctcaaggagatgagaatgcgaaggctctaacgaagctcggggatagcattgataagtatatacgtgaaatgcaatgtggtgagacattgggaatacctcagggtagtgaggtgtttgacttcatagcggagattgtgctagcttatgccgatagtcagctcaaaaaggcattggatgagaaaaaaattgaaggtattcggatcctacgatatcgtgatgattatcgcatatttggtaatagtctagatgatctcaaagtagtaacgatagtgctacataagatcttgggagagctgcatcttaatttgaatgctactaaaacttatatatcggaagatccactacgagactctgtcaagaaggataaattggcaagaattgagcgaggattagagaagagggattacgcccgtacgtctattcaaaagcaactacttgtgattcgagagttctctgcagaatttccgaattcaggtagtgttagtatccttttgtttgaagcgctaaggagagtaagggatgagtatggaaaaaggaacggtttccctcgggaaaatctgaaggtgttagttactataactgtagacatcttgatggtaaatcctaggtggtgctatatccttattactatgttgagttatttcattgatgagttatcagcagacgaggaagatgaaattctgagattggttattaagcgattgaagcagataccagaaggtgggcacattgagatttggatggggtatctgtttttgaggcgtggtaagcctcttgtacaagagtatttttctgagccgttgtgtgcctttcttgattacgaaaagaatacgcctcaagagctttggaagatcagttggcttaaagatatatatataaaggactttcctttagagtctatctgtgtatttgatcctgacggttctagagtcatacctgtcgaggagatcgagttatacaggaggaaggtccattacgaagtgtaatccctgctcaggactatgagttcctctacaacgcaggtgttgccgctatcttcggtcctggtaccccagtagcttactccgctgctaaggtcctcgagatcctcctcggtgaagaagcctaagcaactccaataaggtagcccccgaggctacgctactaaacggcagagagccccatccaccgaagtggatggggctctcttttgggcctttatcgaaggaggatcgcttacttcttcagtcgtgcgaggatcttacctgcagattctgagagcaggaccacagcaccagcgaggatcgcagtatccttaattacgaggcgaccagcaccagaaaggaaggggaagccattggcccattcgccagcagttaaggcttcgggcgaagcgtgtacccatgtttcgggcgtggtgatgaggaagctcagcgtcccgagggtcatgatgatgcagaggagctcaccgatgatgccgaggtagggagagaagagcccgaggaagacgaggataccgatcgtcatgatcaggataccgaggccgtgagagaagaggtaggtacggttctctacatgccaatcgtgcttggcctgattgtactgaccttcgggcaccttattgagggtgtattcctttacggtcttgccttcgtcgttggtcaccttgttattggcgtccttgaggaagaagctcatcagcgggctatttgccacgaaggggatgatcccattggcttcgtagttagcgaacttcaagccaccgatccatacgaagatgatgaggatagccacacggatcagtttgcgtccgaggcccccgagattgctcgcgcactccaagaaggagatgaatgctttttgcattttgtttgagttgtttgttaggttgttgttaaaagaattgtctgacttacaaacctgatgcttcttgggaaagttcacacagtgcaagctggtggctgctgagaaggcttggttttggggcgaaaggaccttctgcttcggaggtaaggtatatacctttcgttagtgaggaatataccttttgctcgtgaggaatattcctcgctgtcgttgggaatataccttttactcgtgaggaatattcctcgctgtcgttaggaatataccttttgctcgttaggaatattcctcgctgtcgttaggaatataccttttgctcgttaggaatattcctcgccgtcgttaggaatataccttttgctcgttaggaatattcctcgctgtcattaggaatatacctttcgatcgttaggtatataccttttgtccaaaagattactacctttgtttgtaatctaatcaatacctcaccgcaaagcccctcctccttccttgaggtaatgtttccgagggaaaatctaattcatgttatggcaaataaaccattacaatttatcgtcgtcgatcgtaagatctctgtcggcaaacatgctggtaaggtgatgcaagtcgctatacctaccgggcgccatcgtattgacttccgcagcttctgcgagcgagttgccaagtccaccaccttcaatcgccaagaggtcgaagctgtccttaactacgctactgagatagcgaaggatattgtagccaatggagatatcgtggatttcggggatctcggctcgctgatgccttcattcaagagcaaggctgtagaacaagggacgaagttcaatgcgaacattcacatcgaaaagcccgtggtactcttgaagccttcgagaaagtacttcacgctcaccgatgtcagctatgagcagacagagcctaagaccaaggctgcaaagtcaaagcccaagaagaacacgcccgagggcggcacgccttctgagggcaacgggcacgtaggtatctaagctccgacggctaagtcaagacgcttcgccccgccttcacgtgatgaaggtggggcgaatgcctttggtggcaggaggaatcagctccgtcggggagcgggagtcgatgaactactgcagggcgtagggtgttctaagagtgcatgatgaagattattcgcacgatttatcataagacacggcgcctcatcgccaatacgcctccgctgccgacggagctatttacttttcctttgggcttgacactggtcctgctcttcccgccggctgtggcgtggatagcagtagccgccttgctcacactctctatgctcctcctatggtgtatgggggcgctgtgggtcaatcgctctgtcgtcggccgttcgctctttgtgctcctcctgtggggtgggcttttcctgctctcccccgaggacgtcatggagcatcccttaggtgctcaggcgctccttctcatcagctatctcatcagtagtatcgtcgtcgcagcctatcgttgggcaaaagagtacctaatgaaagggcaagggctctgcatccgtgggcgaatcctgcgtgtcgagcgactacgcttcgagcgcatcttagtcctttcgtctctggcgggactgctcttccaggggctttgtgctcagctttgtcccgtagagcatcgtgatctcctgcacatcgcctcgaccttcatcgtcctcttcacgtgggcggtctacacgatcgagtgcattcacctcgtctgggtgcaacgtcgcctcgataatgaagaatggatccccgtgctcagcgatgaccagcgccccatcggtcgggtgcctaagacgactcccgagtatgaaggcggccgcctgccagtagttcgtctcatcgccttatcgcgagatatgatctatctggagcagtctgaggcgccatcactccccgctgcctctggctacgacacgccattcatctcgtggctcactgagggtagccgccctgaccaagtagctcagcgcctcatcgacttgcgcttctgtggcatccgtcgtgcgcgtccccgctttctgctgcattatcacgaagagatcaatggtcaggcgctcagcgtctatctcttcgcagtggacatcgcagagcctggtcagctgctcatcgactgtcttccgacgcgtggcagatggtggcccatcgaccatctggctccagagatcgagacgggtgacttcactcgctacctgcgctccgaatacccttacttagagcagacgctactcttggcgcatcgtcttcgctcttcatcttcccattcttaagacttccatggctcactccaatcttggcaagctctatctgatcccagtgcccatcgccgaagtagatcatcgtacttgcctgcccgaatataatcgggagcttctgcctacgattcgccactacatcgtagagaatatccgctcggcacgacgcttcctcaaggccgctgatcggaatattgacattgatagtatcaccttctacgagctgaataagcatacgcccgaaggcgctatcggggaatatctccgccccgcacaagctggtgagcccgtgggcgtcatctcggaggcgggctgtcctgctgtagctgacccaggagctgatgtagtagcgctggcacagcgcctcggtatcgaggtcgtcccgcttgtaggtcccagctcgatcctgatggctctgatgggctcgggcttcaatggtcagggctttgcctttgtaggttacctgcctatcgaagatgctcgccgcgtgcagacactcaaggagctggagcatcgtgtgcataccaagggcgagacgcagatctttatcgagacgccctaccgcaatgtgcagctcgtcgagcaactcattcgccactgctctccagatcttaagctctgcatcgcatcgggtattagctccgaaggcgcgatacttcgtacacgaaagctctctgcttggcgtggcaacatcccccagattcacaaggtccccacgatattcctcatcggtcagtaagctcctttgtgatggcacttcagacacctatccccgctttattctccgatcagcttcgggagttatttcccaccgaggccgaagccctgcttgcttccttagacgaagaagcatctgtctcggtgcgcctcaatgtgcgtaagacggagacgcctcctgcttctctacctattggagaagctgtcccttgggctaagcctgtgggcttctacctcgatgggcgtcctgccttcgccgctgacccactttggcacgcaggtgtctactatgtacaggaggcttcatcgatgcttctacgcctcgtagctccactcttgggcgaagaacccttgcgtgcgcttgacctctgcgctgctccaggcgggaagagtacgctcctcgtggaccttctccccgaaggtagtacgctggtgagcaatgaactcattcgctcgcgtgcacagatcctcgcggagaacattcagaagtggggtggggtacactctgtagtgacctcgaccgaaccgcaacgtctcgggcgtctcagagagcaatttgacttcatcttagtcgatgcaccttgttcgggcgaaggaatgttccgcaaagaagaggaagcccgccgccaatggacccctggcttggtcgaaagttgcgcccgtcagcagcgggagatccttgacgatatctggccagcacttgcacctggtgggctgatggtctatagtacctgcaccttcaatcgtcaggaggacgaggatatgctcgcctatctcgccgaggaattaggtgccgagcccgtggccttgcctgaccttcccgagccaatcactccatcgtccctcagctcttacccctgctaccgcatgatgccgcatcgcttacgtggcgaaggcctatttatggccgttgtccgtaagccagatgccgaggtaggtagcgctcgtaccaagtctgctcgctcaaaaagcaagcccaatccgaaactccctcaggaggtacttcgttggcttagtccagagctacgtgcagatgtcacgctacagtccttgcctgacggcacactcacggctattccctcggcattgtatcccatcgtcgaagcgctccaaggggcgaagattcccattcttacttcggggattcccttggctgaagtcaaggggcgcgacttcttaccgcttccagctctcgctctaagcgtggggctggacgatgaagcctttccccgagccgaactgacgcaagaagaggcgatccgttatttggctcgtgaggcagtctcgctttcagctgacacgcctcgtgggcttgtcctcgtcacctatgaaggctatcctttaggattcgcgaagcacttgggtaaccgaacgaacaatctctatccgcaggcatggcgtattcgccatcctgagctcctgctctcagggctggatgcgaaggaataataccttcgcccatccatggataagcccttttatctaaagcaattcaccctctatcaggggaatacggcgcagcgtgtggggacagatgccctgctcttaggagcatggcccttcgtccacacattgcccgagaaggcgcatatccttgatgtcggagctgggacgggtattgtctcgctgatgatggcacagcgcttctcggacgcagtggtcgaagcgtgggaggtggaagacggcgctctcaaggacgctgcgacgaactttgccacctctccctttgctgatcgtctccgcattcactcacaagactacctgcatgccaagcaggaggactggcatccctttgatcttattatctccaatccaccctattataccgaaggcattctgcccgatgatgtgcgtctgcgcttagcgcggcacgtagccgaaggcctatcgcctgagaatctccttcgcacggcagcgcgactcttagctcctcgtggtgccttagccttcatctcgcctgcggcctcgcttccttctcttcgccgaatagctgtcgagtcgggctggcgacttagtgagctggttacgatctactcgaagcctggagaggtcaagcgtacgcttacgctttggtgtcgcctctccgatactgcggaatacacaccgactcactgtcttgatctcacactccaagacgctaagggagcaccctcagccgaatataaagcctggctcagggacttccttctctgattctccccatctttttatccttggtagtggagctgaataggcttcactatctctgtatataggtatgtggtggtaaccagtactggtcagcagtcgaagtagtactggtcgctatatgttaccagtactggtcgcaaattggaccagtactgcttcactcgttgaccagtactggttcatatttcccctctttactgctggttcggagtacttctttggcggcttggtatggtcagctatatgtctgggctttgttcgatagagagatagctgatgtatcgtgcttgacttgaaaggtggctccctcaagcaggaatcatgaatatatactgcgggagaattggggcaaaaggaaaaaaatgtttagctttgtagtgagcaagattttcagtccttattatacctcttcgaaggcctttgcatacagtctctccaaggggtagagtggggatgggatagcactacaatatagaagagaatgactatggaactccagacaccagaccaagcacagcttgaccacactgcccccgcagcacaagacgcggctacaccactcgatcagactccctcctatcagtccatgagcccccaggagctcgtcgatcacttggctgtactccttcagcaagaagaactacctgagcgtaagctcgtcgagaatatccgtggtcaattcattcgtcgtcgtgagcgccttgatcccaacgacaaggagcaacgtgaatccttcgaagtgcaagaactccgcctcgaaggcctactctctaccttccgcgagcacgacaagaagcgtcaggaagccttagagcagctctatgctgaaaataaggtcaagaaggaagctctccttcagcgcttcgaggatctcttcaagagtaatgaggaaggcgccgaatttggaagcctttactcgaccttcaccgctatccgcgatgagtggaatgccctgggacaactggatcccaaggatgccaccgtgctcaaccgccgcttctacgagctgcgtgatcagttctatgatctcaaggctatcaatgatgacctgcgccagatcgacttcaagaagaatctggaggcaaagcaggctatcctcgcagagcttcgtcagctcgatagcgtgaaggatacgatcgcggcttatcgccgtctgcaggagctcaccgcacagtggcacgaacttggccctgtatcaaaggagcatcgtcaggagatcaacaccgaattcaagcagctggctacggcccagcataagcgtcatcaggagttccatgaccagcgtaaggctaccgaagaagagaatctccaggctaaggagcgcctctgtctgcaggtagaggaattactctcttccgctccactctcctcgcactctgcctttaacaaggctgtcgagcagatcaaggctatgcaggaagagtggcgtaagatcggccgtgctccccgcaaggacaacgaatctatctaccagcgcttccgtgccggtatcgatgccttcttccgccgtcgcaatgacttcttcaaggctaatcacgagcataccgaggagatcctgcagaagaagcgtgcgctcatcgagcgtgctgctgctctgaaggacagcaccgcttgggaggaaacgaccaacgcactcaaggctctccaaaaggaatggcaggagctcggtgccgtatctcctaagtacagccagaagatctgggaagagttccgtgccagcttcgactacttcttcgatcgtaagaagaaggaagctccccgccgtgacaaggcttacagcgaagctcgcaagagcctggctgtaaagcgtgagatcatcaaggaacttacggctatcaacgaaggcgaagtacctgagaatctccgagatctactcaatagctacaacgaacgctggaagcaggctggcttcgtccccaacaaggatcgtgaggctatcaatgcggcttatcgtgagctgctcgatgctctgcatggcaagctacgccgtcatcgtgaggagcgtcgtctctcgggctatagcgcttcgctgagtaatctcgagggtaagggggccacgctgcagagcgagcacagccgtatgcagcgtcatctggatcgtctgcgtagcgagctccagacctatgagagcaacctgactcgcctcaacatcagtagtaagtcgggctcttcactcctctccgagatagagcgtaagcgcgatgctctcgtagcagacatccacctgacggagcagaagatcgccctcctcgtagaaaaggaaaaggcaggcgaagaggcttagtcccttcctcctctcacttcatagcgactccccagggaccccatgatggcgtgcctggggagtcttttgtctcccactcctatgctcgctcgcacactcgtgcactatggtctgcacttcgtctttccgctggtgatagcgctgctctggccgcgtcgtcgctggacgatggtgtatctcctccttctatcgactatgctgatcgacgtagaccacctcttggcacgcccgatctttgacccgaatcgctgtagtgtcgggacgcatctcctgcactcctatccgatggtagggctctatgtggtgatgctcttcctaccctatgagcgctggggatggccttggtggctacgtgtcctggcagtcggcttgaccttgcatatcctcaccgactggcaggacttctacctgtggttgcactaagggtcttgatataaagagagcgccccgataagcgataggcttatcggggcgctctgtctttaggggaaagtatccgaaggactacttagcgaagtgcagctgaaggcccttgatacgcttccaagctccacgagtgaagtcggggaaggcaacaggtgcagactggtgctccagagagagacgagtcaggtcaccgatgacagaccattcagcgaggtcatagacgtccatatcgaggggcagaccattgcgcatacagtagatcagacgatagtccatgatgaagtccataccgccgtgaccaccgaccttcttagccttctcagcgatctccttctggatggggtgctggtacttcttcatcagctcatctctggtagcatcgctgacgtagtcgtggctcttgaggtcttcgtggttaggtacagccttgaggttctgctctgtgggacggagagcatagccttcattggggtatttgttcgcgaagccgtcggtaccgatgacctgatacatacggtcgtatgggcgataagaagcgacattgtgctcgaggtagatcgtcttgccaagagccgtcttgatgagcgtctgagtcatctcaccattcttgactacgggattctttacgccgagctgcttctccatgaagcgagggatagaggtggcaggtacgtccatagaggtgaggtactccatacggtcgccacggtggatattgagtacccagcaagctgggccaaggccgtgcgtcgcatagacatcaccgcgattctcctgattgaatttcaggcgccagttgccttcgtagtacttccagaagggctcgaggttgtggatgtaagcacccttagcgctgaggacatcaccgaagaggccttgctgagccatgttgagtgtggtgagctcgaagaagtcatagacgcagttctcgagcatcatgcagtgacgctgcgtgcgctcagccgtgttgatgacgtcccaagcttccttgagggtcgtcacagctggtacttcacaagcgacgtgcttgcccttctgcatagcatagatcatcataggggcgtgacgtgcccagtcggtagcgatgtagaccagatcgatgtcggggcggtcgcagagctgcttccatgcctcttcgctaccgctgtaagtagctgcttcggggaagcctgccttcttgaggatagcttggctcttctcgacacggtcggggtgaaggtcacagagcgccttgatctctacgccctcgatctgggtgaagcgctcgacggcaccagggccacgcatacccagcccgatgaagcccacgcgaacgacaggcatcggagcatggcggagtccgagtacatctcgctgcccagcggggcgcttagggatagcggtctcgagtaggtagctcttagcgggctgcttactctttgcctttccctgggcacttacggcccccaccgagaggatcgtagccaggagtagggaggctacttgcttgattgctttcatgtaattgtgtagaattaaaatatggtattatttaccgaattcggaggtgaagtggaagcgtatcttggggaagtcctgctgcgccatcgtcagtacatagcccgagtcggccagatagacatcacgaccaataaggtccttcgccatgaactgagacttacgcttcttgaagttctcgagctctgcgggatcatcgctttcgatccagcacgccttgtagaggctgataggctcccagcgacaggcggcgccatactcgtggagtaggcggtactggatgacttcgaactggagctggccgaccgtgccaatgatcttacgaccgttgaactgattgacgaagagctgtgctacgccctcgcccatgagctggtcgatacccttggcgagctgcttggtcttcatcggatcttggttctcgatgtacttgaagagctcgggggagaagctggggagccccttgaagtgaagctcctcgccagccgtaatggtatcaccgatgcggaagttccccgtgtcaggtagaccgatgatgtcgcctgcgaaggcctcctctaccgtctccttgcgctgggccatgaaggccgttgggctgctgaacttcaagctcttgccgaggcgtacgtatttgtagctcgcattacgctcgaagcgaccggagcagatcttgatgaaggcgatacagctacggtggttgggatccatgtttgcatggatcttgaaaacaaagccagtgaaggcgggttcgtagggcgacacctcacgttcctcggccttgacggggcgtggagatggggcgatctctacgaagcagttgaggagctcttgcaccccgaagttgttgagtgccgagccaaagaatacgggagcaatatcgcctgacagatattcttcgcggtcaaactcggggtataccccatcaacaagctccagatccatacggagcttctctgcctgctcgggcgtgatgtgctgctcgagctcagaggagttgaggtctgtgatcgtgacgctctcggtgatacgctgcttgtcaggcgtgaagagattgagtgcaccctcgtggatgttgtagacaccacggaagcgctgccccatatcgatgggccaagagagagggcgtacacgtatctgcagctccttctcgatctcatcaagtaggtcgaaaggatcctgcccctcgcggtccatcttattgatgaagaccatcacgggcgtcttgcgcatacggcacacctccatgaggcggcgggtctgggtctctacccccttagctccgtcgatgacgatgatgacgctatcgacagcggtgagggtacggaaggtatcttcagcgaagtcctggtgaccaggggtatccaagatgttgatcttgtagccagcgtactcaaatcccatgacggaggtagctacggagataccacgctgcttctcaatctccatccagtcactcgtcgcggtcttcttgatcttgttactcttgacggcacctgctacgtggatagcccccccgaagagaaggagtttctcggtgagggtcgtcttaccggcgtcagggtgactgatgatagcgaaggtacgtcgctggtcgatctctttcttatattcgttcatgtagggggatctaattatgagtagtgtcttcggcctcgatgccctcttgctccatcttgtagcggtgagcaagcatagctaggaaggcgctgatctgcttcattgacttcttggtctcctcgctgacctccttatgctggaggctgagggtgatatagccgtagagggcattaaagcaagtctcaaggtcactctccactgctccgttattcttgcctcggagctggatgagagctgggagtatctgcaggtgcagtcccgagtagacgatgtcattgggattgctgatgaggcggcggtgaagctcctcgagctgcatcagcacgatgcggttgacatcaagatgccccgactgtaccttgccctcggtgcgcatcatttcgataagctctagataccataagcggatcttagcacgcttctcttcgtcgacgtcgtagcgggggaggaggagctgatcgactccctcaggggagacgcctgcagcacggatgaggtcctctacctgccacatatagagcaggtattctgcgatattctctttgcgcttcttctgtgcaatgatcataggggagagcggctacttcttcttgaggagtgatgaggcgagggcttcgtctgcatcatgtgcgccgggctggaggccgaggatacggcagacgagagggtagagggtgatattggggatgggcttagagacctttcttccaggctggaagtctggaccgacagccttgaagatggcgtacatctcaggattcttattgtcgaagccatgtccagcatagaggaagtccttggggatgccttgaggacggaagaagatctgcgtgccgaggtctgcgatgagtaccagctcaccgatgcgggggctgctaccgaagtgtaggcgagcgggtagctcattcttgcggtataccgatacgtggggtaccttcttcaggatcttatatgccgtctcggtatagcccttcttgggatagaggtgagtgaagggccctgtagcgacatgctcaaagctatcaatagggaggtagtctgcgaggttgaccgccttgctgcggtcgaaggactgcatcccatggtctgagacgaggatgaagtctacctgctgatggatgggaagcttagcgagtcccttgcggaagtagccgatgactgagtccatcttctctaccatgcgaagggtcttaggtgactcagggccgttgtggtggcctgtatggtcgggctcttcgatataccacataaccagatgtggacgctctgccgtagggaggttcagccagctaagtaccgagtcagcacgatccgtgtagggtaccttgtcgttgaacttcttccaacggtcggggtggtgtcccccgacgggtgtctcactaccgacccagaagaagctggcggacttcactccgtggcgacgcgctacattccacagtggctcgcccttgtagaaggcgggatctgctacggccttgcggtcgccgaggcgatagcgtgcaccacgctcgtcccagaactcattgccgacgagtccatgattattgggataaagccccgtagccatcgagtagtggttggggaaggtcagcgtggggtaggaggggcggaagcgaccagcaagcccctcacgatccatcgcatcgaggttgggggtagcgcaacgcccttggtagtcggggcggaagccatcaagtgagaggatgaccacgtagcggtcttggcgtggggtaggctgtctgagagcagctgtatgttgtctggtcgtaccgcagccagtgatagcagtagcggtaagggccgtggcgcagaggagcgcacagagactcgacttcatcggagtggcagatctatttcgtaagcgtgaaaaatgctccctgtcgaccgaggtggagggcaaggagacctattgttgtctttactacaaagttaatgaaaaagcccctttgtgcgatgcctcttcgttacgtgagtgctgagcttgaatatcaggaatagtctcctcctatttctctcggttatagggtcgtgatccccctgggcggggcagtcgcttagtgcgactttggaggggctgtatagtatcttgggatatagcctgttagagtggggaatatgaaggagtactggtcactaagtagaccagtactggtcggtgatatgtaccagtactggttcgattgctgaccagtactgctcacttcgtcgaccagtactggttgacattcctctttcaatcgttcttctctcagtataggttcggatccatacgtgtagccccttctccgaaggctgatggcactttggagaaggggctacacgtgtggtaaagagaagggtgtcggactatggacgcgagtagagtagtggtgccaccgatgggcgtacctcgctgagtgctcctgcgcgatacgcacagtctccattgatataggtagcctcgacgcggtgaccgaaggcgtgaccttcgaagggtgaccaaccgcagagggagatgatgctctcagtcttgacgggtgtcttgccctcgggatcgatgaggacgaggtcggcatagtagccttcgcgcaggtagcctcgcttctcgatagcgaagagctcggcagggcggtgtgccattttctccacgaccagctccttcgtgaatacgccttcgcgagccatgtcaagcatggagatgagtgcatactgcgtgagcgggcctccgctggctgcggtgaggcagttgccttccttctcagagaggaggtgtggggcgtggtcagtggctacgatgtcgacgagtcccgagcgaacggctgcacgaagcgcttcacgatctcggagggtcttgacagctggattccacttgatgcggttgcctaagcggtcgtagtcggcatcggtgaagatgaggtggtgcacacagacctcggctgtgatcttcttctcagcaagtgggaggtcattgcggaagagggagagctcacgctccgtcgagacgtggaggatgtgcaggcggctatcaaggcgtgtcgccagctcgacggcttcactcgaggagcgatagcatgcctcttcgctgcggatgagagggtggtagtgtacatcgagcttctcttcgcctacggtggcgaggtagtgctcgcggttagcacggatgatctcttccttctcgcagtgcgtggcgatgatgaggtcggtctcagagaagatacgctcaagggtcttcttatcatcgacaagcatattacccgtcgatgagccgaggaaaagcttgagcccaggggtacgacgtgcatcaattcgctggatctcatcggcattatcattactccccccgaagaagaaggagaagttggcccacgaggtctcggcggcacgctgcatcttccattcccaggcctcgaggttggtcgtaggaggcttggtattgggcatctccatgaaggaggtcgtgccaccagcgacagcggcacggctctcactctctatcgtagccttgtgcgtgagcccaggctcgcggaagtgtacctgatcatcgatgcagcctggtaggagccagaggctttctgctgggattacttcatcgacttcacagaggaggccttcggggaagctgttctctccctcgtatatgcgctcgatgagagcccccgaggtcaagagagaagcagtgaaggagcggccttcgttgatgagagtagcgttgcggaagagtcgtttcattgtagtattctgtgagattaaaggatggagaggagagctaatgtattgttgagaaagtggaggagtatcggaaggcggaggttgcgtgagtccactgcgaggtagccgagcatcatccctaagagcatgcgactgggaaagcccacgatagctccatggaagagggcgaagatccctgctgagaggatgatcgggagccaacgcttgtatgggaggatacgctgcagtgtgccctggagaaggcctcggaagaagaactcttcggtgatggcagggacaactgccatcgtgaggaagagtagggggcgagagccttctccactgctgagaagctgtagtagtcgagcctcaacagcatcctgtacagggtagccaagcttctgagcaaggactataattcccatatagaggagctgagcaagaagaaggacaaggagagagagcccgaggatggtgaagctatgcttaggctttcggtacttggctggtagcggttgggagatcctgctccaagcagctttccccgagggaaggaagaaggtaggaagcaaaaagatgcacagcgaaatcacagtattcgtgatcagctgtgcatctactgatggggtcgggaggagtgtccccccgagaagcatgagtccaggagtgaagagacctaatgagatgagtatccatgcagcgagtgccgcaagctcggtctgtggcttcattcctcgaggtcttcggctgtatcgtcttgctgtaaaccttgtcctcggcgaatcttcagcggggagagaccgaacatacgacggcagaacgctgacaggtagccaggtgaggagaagtaatagcgctcagagatctccgtcagtgataggttgctatcgaccagatccttgtacacatggcgggcgcgctgctggagaagccacttcagtggagagacaccgaactcatcgtcgaacatacgcgtcagcgtcgctgggggtacgccgagcttgctggcgagatcctctacattgcgacacgagaggtgatgcttgaagacctgacagctgaagcctgagcgcttgcagtggaagcctcgaaggaattcctcttggacgcggcgagcatagttcatgcgtagcaggaggaagagttcttgaagctttacgtcaaagaggcgcaggtcagagagggagtattgtaagtactctatgatggcacatgtccagaggtcaataccatgggacatagggagcaccgtgagatccttccccttatgcaaatctgggagctggaagctcttcttctttggacgctctgggcactgacgagcacagagatgtacgctggggaggaagtggaaggtaatgcatgaagtctctccctcggccacgatattgaggagggtacccatcgggacgaagatcatactcttcgctgcgaagtgctgagactcctgctctccattcatgtaggtagtgatcttccctgagaggaggaagatgaggtaatagtcaccttggctcttcagatagaggtgctctccatcggctaattgcttgtgctgcgggatggagataagggctgctgactggtgcttgaagaccgagttgccagtgaataaaggctcttcgtcaaaccgaggagaggctactgtcggacgcataaaataatgggttgcaaagggtgcaaggtaatggatgcagggctgatattatagttcaagtagtcctgtggggatatgcagatagaggcggtgcccctggaggtcaaggcgctcaatgagctcctcggagatagggaggataagctcctcgccagcagtcgtctcgactcgcagtagagtattgattgtcgattcgtcgatctctacagcacgccctacatagctttgtgtagaggcatcgtagaggtcaaagccgacaaagtgctgaaggtcgaagaagtcctcgacatcttcctcaccagagaggtagtcacgatccagccaaacgggacgccccgtgagagcatctgcttcgtccttcgtcgtgataccagagaaggtgatgaggtcgatatcctcccctttggtgcgacgctttagcacacggtaggggatgagcagaccttgctcctccagcattaaaaagagtgaggtgtcagccccctcccatagaccagagaggtctacggagagcttggctgacacttcaccttgcgtaccatgggcacggcccaaggtacctatatgctcgaagtcttccttacgcagcatcgtttagaggcgggagatacgggctccaagagcattcaggcgggctgcgatgtcttgatagccacggtcgatctgctcgatattattgatcgtgctggtaccctctgcactcatcgctgcgatgagtagggcgatacctgcgcggatgtcgggagaggtcatcttcgtagcacgcagctggtgcgactgaccgagaccgatgacgacggcacggtgggggtcacagagcataatctgagcgcccatatcgatgagcttatctacgaagaagaggcggctctcaaacatcttctgatggatgagtacgctacccttggcctgggtggctgtgacgaggaagacgctcaggaggtctggcgtcagcccaggccatggagcatctgctatggtcaggatagagccgtccataaaggtgtcgatctcgtagccgttggggtggcgggggatgaagaggtcatcgccctgctcttcgatcgtgatacccagacggcggaaggactgtgggataatgccgaggtcagggatgctgacgttggtgatgcgcagctccgagttcgtcatagctgccataccgatgaagctaccgatctcgatcatgtcggggagcatagtatgctctgcgctatggagctccttcacgccctggatagtgaggcggttggagccgataccctcgatctgtgcacccatacgtaccaggagcttggagagctgctggaggtaaggctcgcaggcggcattgtagatcgtcgttgtcccttcggcaagagctgctgccatgaggatgttcgccgtacccgtgacagaggcttcatcgaggagcatatacttcccctgaagcttcttagcctcgaggatgtagctcttcttgtcggagtcatagacacagctagcaccgagctcctggaagccgatgagatgcgtatctagacggcgacggccgatcttgtcgcccccaggcttggggaagatagcgtagccaaagcgcccaagcagagccccagccatgaggatggatccgcgcagtgctcgcgagcgactgaggaactcctcactgtgtagatagtcgatgttgacttcgtcggcctggaaggtatagcttccctcatcattgaggcgcgtcaccttcacgccgatgtggcgcagcaggtcgatgaggttgtttacatcgaggatgttggggatgttgtggatcgtcacgacctcaggggtgaggaggacagcggagatgatctggagcgcttcgttctttgcgccttggggacggatgctaccctgtagggaatagccgccttcaattacgtaggatgccatatagtagtgagtggtatcggagcttgaattatttcttcttagccttcttgctgttgagaggcttctggagcttacctggtttgtctattgtgttggggttgatgttgagcttgcagttctcaggagtgaggaggatctgaccatcggagagctcgaagaggtccttgaagatcttgatatcctcgacgttcccttggttccacgtcatgtagtcgcgcttcatctgcagtgcgatgaagtactccgcagcagcacgctcgggtcccatctccatagcgcatacacgctggatcatgccctcgatgaagtgaccgtagtagcggtacttgatgaagtggcctgggtactcgggcttttgcgtctcgtgctggatcgcctccttggtgatggtcccctcggggtagtcgacatcaagctcgaagtcggacatgatagcgaggtgatcccagtagatggtctccttgtcgatgccagcacccttctcgggtacgatggcctccatggagcgtatgatactgcgggcacaagcattccgctcctcacgatcctcgatcgtcttgcagtgggctaccatattctggatatggcggccgtactcggggagaatgatggtgggcagttgattgttatattccatgcggtgaggagaattacttcagacgagccttgatcgcctcggtctcagcctcgaagccgggcttctcgagcagggcaaacatattcttcttgtaggcttcgacaccgggctggttgaagggattgacctcaagcatgtagccactgataccgacggccttctcaaagaagtagaagagctgcccgatgtagtaagcatccagcttggggagtacgatgcggatgttggggacaccaccatcgatgtgtgcgacgcgtacgccgagctcagccattttattgacctcatcgacgcgcttgccagcgagatagttcagaccatcgaggttggcttcgtctgactcgatgcgtagggtggtatcgggctcagcgatgctgacgatcgtctcgaagatggagcgctcaccctcctggatccactgccccatggagtgcaggtcggcagagaagtctaccgaggcattgaatatacccttgtgatccttcccttcgctctcaccatagagctgcttccaccactcaccgatatagtgaagacgtgggtggaagttgccgaggatctcgatcttcttgcctgcctgatagaggctgttgcgagctgcagcgtagagggctgagggattctctgcgaaggggacggactcatcgacgagtaccttcatctcacgagcaccgcggacgagctcacggatatcgaagccagctacggcgatagggagcaaaccgacgggggtcagtacagagaagcgaccgccgatgtcgtcggggatgatgaaggtcttatagtcctccttgtctgcgagagtgcgcagggcgccacgcgccttgtcggtgacggcgatgatgcgctcgcgagcttcttcgcgtcctacctgctcttcgaggagtgccttgaggatgcggaaggcgatagcgggctcagtcgtcgtaccactcttggagatattgatcagaccgaagcgcttgtcacggaggaaggctacgagctcacagaggtagtcctcaccgatgttgtgcccagcgaagatcacctgaggagcggagtgcttcgtctgataggcttcgaaggatggggtgagtgcttcgatgacagcgcgtgcaccgaggtagctcccgccgataccgatgctcacgacatagtcgcagcgctcttgcagtccacgggcggcctcttcgatggatgagagttgctcttcgctgatctcacaggggaggttgatccaccctaagaagtcattacccagccctgtgccagcgtggagctgctgttggtactggttactcttttcttcccatgcttggacactctggggtgtgacagcggtgtagatcccggagagatctaatgtaagcgtcttcattgtctctatgcttaattatgtattcgcaattatgtatcgccgaggcctacttgacgtaagcccgcgatgtctccttctcgttgtgcccatgacctaagcggtggggacaacatggatttatgcaaagatatgaaaaagccactaaattacacagttgcgtggtctatttcctgcataaaagaagcacctcccatgctcagtccttagaccaagtatgggaggtgcgattatctcgcctccgaggcgggagagatggacgtcgctcctacttatataggtagcggcgaatgctctgcttgggagtcttctcgaagggctcggtgcgaagctcgaagcgctggatcttctcgtagctaccgacctgctcgttgagagcagcgcgctggctctggatagcttcccatgcttcatccagcgtgatgcctgcctgctcgatgagctgcatgttggggacgatgagtgcctccagcttcccctcgcgcatcagtacgagactttcctgcacgtaggggagcataccgatcttagcctccagctcttcgggatagatattctgcccgttgctaccgaggagcatagccttggagcgaccacggatgtagaggaagtggtcgctatccatcgtgccgaggtcccccgtgcgcatccagccatcttcggtgaagagtgctgccgtctgctcggggttcttgtagtagcccatacagacattctccccacgcacctggatctcaccgatctcggaggcggtggcagagggtgtctgctcgtcattgagaggagcgatacgtgcctccatatagggctcgagcacacgaccgcaggagcgtagacgccattcctcagcttcgatgaaggagatgagcggtgcacactccgtcataccatagcccacggtgatggggaaaccaatgcgcttgaggaattcgccgacctcgggattgagggctgcacccccgacgatcacctgacggaatgctccgccaagtccttcgcagagctgctcgcggatcttacgatagaccacattgcgcaggatgggcagggagagcataaagcgtaccttgcggctcttgagtatgggctgaagcgtattttgatagatcttctccaggacaagcggtacggatatgatgaccgtggggcgcaccttcttgaaggctacaccgaggatcttgggcgaaggaatcttacccagcacgacgacatgggtacccgaagccatcgcgaggaagaggttgatcatgcagctgtagacgtgtgccatcgggaggaagcacagcagggtctccttagcgcggatgatatttcgctcaatacagaaggcgaggttccctgcgaagttattgcccgagagcatgacccccttgctgaagcccgtcgtaccggaggtgtagttcagtacgagaagctcttcattcggggtgtggtagtagctgacatcctcggggcgcatacctgtggggtactgcgccttgtggttagccttggcatcggcgaactgctgtacagcttcgggcgtgccgtgaaggatatgcccctcttggaagtccaggatcgtagatgctaaggggatgccctctgggcgcatgttgctccacagatttgcattgatcgctaagagcttcgactcagagtggtcgatgatctgcatcgcatcagcaggagggaagtcctgcaagataggcacgatcaccgcaccataggtaatgacggctatgaagaagatcgcccattcagcagagtccttgcccatgagagcgaccttatcgccacgctgtagcccttggagtcggaagaattggtgccactcgtctatggcttcggtcatctgtccgtaggtataggtctgtccttcgtagttggacatcgcgggcagatcccagtgtttcttaaagctatcttcgaagaaggatattaagttctttgctatcatttcttgagtggggtgagtccccatgttccggtaaacctttgggcaaaggtacggctttttgcttagacctgcacacttcttctcattgtgagcatgtataagagagtagccctccccatcactgctaagcaagatgatggggagggctacttggtatcgtgtggaggaagtcttgcggagagctccagctcagagacggtagttgaagccgaagctcaggagctcattgtactggagatgcttattccatcctgatgcgggacgcacggcatcgtcgtatcggaggttgagattgaggcgcgtggagaagaagcgcgtcagcgccatatcaagcgtgttctcccactcggcttcgacttgctggtaggaggtgttgaagtagaatcgtgaggtccaagtgaggttcatgttcacgcgccactgccagttcgcacggatcgtggagccgatgcgctgataccagagcttgtcggagctcagaccgtgacgtcctaagtcaatgtggctatccttcgtcgcgcggaaggtgtaggagagtggagcgacgttgatcgagaggtcgaaggagcgaccgtagactctcttggacttcatcgagtagtcgtacttcatcccgagccctacgttgatcgtgtacggagcgaggaagtcggactgcaggctgcgcttattctccagataggagtggaggagctgcgtgcggagctcagcgtcgatggtatagtacatcttgttccaagccttcagaccatagttggagcgcaggcgcagcaggtcatctgcgatgcggtagcgatgcacgctatccttctcggcattgtagacgttcagcttgctctctatctcgttggtccactggacacgctcggtgacgtagcgtagcccgaagtacgtcctcataaagaggttgaggttggaggcaccgcccttgtaccagttgtccgagacatagttctgtgagaactgtatgctactctccagtgcggggatccagtggcgctgctgcaggaccgacaggctgagatcctggggtagctgtatacccagcgtgggggtctccttggtatattcggagagggcacgttcggcggattcgaagctgggacgtgtcagcacgagggtcttgggcttggagctgaactctcgtccaccgataccatctctcgagggcaggatatgcgcgagcatacgctggcggagtccgtagctatagctattaagtcccgagaggtcgataggaaggtgctctaaagtcgggccagatgtcggggggaggaagctcagctcgggggcaggaagctcaaggcctatccccgagacgggagagaagtcgagccggctcttcgtcgtcttcttccttagagtggggctgatgaaggggagggtagactggtagggattggtccctcccgcctgatagtactgcaggagctgctgagagagactgggggctacggcgagaagctccaggagaagaggcgaagagacaggggtaggggtatagtagtccgtcccttgagtcacgaggctgtccagggcgaaggcttggagggcgacctcgtcggtcgtaggctgtacctgctgtgctgccagtcggggagccgcgaggctcatactactgagggtgaggaggagtacgtgtcgtcgtataagcattgtcttcgtagcattggcgctcttcatcgagcgctacaaaggtagtataataagatggggtaatatcgctctattctgctgactcgtcagtttggtgtgaggtgagctgcgtagatatgtcgctacggtgattcgccctcgctgtcttttgaggtgaggcgcactacggcgaccctcactgatcctctgtagggaaacttgttctttgccttagataaagcttcattctcgcttgtaaaaagttctcaggctatagctctatagctttgtctatgtgcgaagacctaaggactacgtgcgtggatgataggcttctcgtgcatggactttaagactacgtgcatggatcaaagtatttcccttgatcttgaggagaatacagctattgcgcgagaggagataccaccagctatcgaggttttttcttgtgatggcagccaaggctctgctataccgctccgagcgtatctctatggaggcgtatcgtccgagatttagtggtgaggtgtgaaggggagtgggggaccttcaatgaggcttatataggcgtcgtctttgccccagggattcattatctttgcgtagctaagcaataacaataagcatcatggcattcatacagactgtacgaggcatcgcgcctcagatcggtgaggactgcttcctcgctgtcaacgctaccatcgtcggagatgtcgtcctcgggaagggctgcagtatctggttcaactccgtcctccgcggtgacgtcaactccatccgcatcggcaacaacgtcaatatccaggacggctccgtcctccataccctctatcagaagtccacgatcgagatcggtgacaatgtctccgtcgggcacaatgtcacgctccacggctgccatatccgtgactacgccctcatcggcatgggatccgtcgtgatggatgatgtcgtcgtcggcgaaggggctatcgtagctgcaggctcggtcgtcttgtccaagaccatcatcgagccttacaccctgtgggctggcgtgcctgctaagctcgtcaagaaggtctcccccgagcagggacgcgagctgaacgagcgcatcgccaacaattaccagatgtacgcctcgtggttcgacaaggaagagaacccctaacctcgcatacttcaataattataataagacctatgaaatcagtcctaacgacttcattagcccttctcctctgcctcggtagctctgcgactgcactgcacgctcaggcctcgaaggatggggctatcacccccaagctcctcgaagagcttcgtcagagtgagcctaagtcctctaccgagaaggcactccacaacgccatcgccgtacaaggaatgcaggacttcttcatcaacaatcagcgcccacgctcgatcgaagataagttctccatcgaggtacagagctccggtatcaccgaccagaagcagagcggacgctgctggctcttcacggggctcaatgtcctgcgcgctcagctgatgactcgcgagaagtccggcacgttcttcttctcgcagaactactccttcttctgggaccagcttgagaagtctaacctcttcctcgaagggatcatcgagacgcgcaagctccctatcaacgatacgaaggtagagtggctcttcaagaaccccatcaatgacggtggccagttcacggggatctccgacaacctctataagtatggtgtcgtacctgctgaggtcatgcccgagaccgcctcgagtaacaataccaagctgctgggtaagatgctcgcacgcacgctccgtcagacggggatccagctgcgtaaggcttccgagaagggcgaatcactcgctcagcttcgcaagcgcaaggaggacggtctgaagaaggtctaccgcctgctgagcctcaacctcggcatccctcccacttccttcacctatacgctgaaggataaggacggcaaggcgatctctaccgagacctatacgcctcagtccttctatgaacgcttcgtcggtgctgaccttcgtggccagttcatcatgctgatgaatgatccctctcgtccttactacaaggtctatgagatcgagtacgaccgtcacgcctatgatgggaagaactggacgtatgtgaaccttcccatggatgagatcaagcagatggctatcgcttcgctcaaggacaatacgatgatgtactactcctgcgatgtcggccgtgagctggatcgctcgcagggtatcgctgctcttgataactacgattacgcttcgctcctcggctatcccttcgacatggataaggctgagcgcatccagaccttcgatagtggctcgacgcacgccatgaccctcaaggctgtggatcttgatgcttcgggtaagcccgtgaagtggaaggtagagaatagctggggtgagaagacgggtgtcaagggccatatcatcatgacagatgcgtggttcgatgcctacaccttccgccttgtagtgaacaagaagtacgctacgcagaaggtgcttgacctcttgaagacgaagcccgtacagctccctgcttgggaccccatgttcgctcctgatgctccctaagcccttgcacgaacataacaaataaggcagcgcccccttagccacgtgctaagggggcgctgccttatttgtccttgtctacctcttctattcggtctgctgcatgatgcagggggcaacttccagccagaagcgagggaagctcttggctaccacctcaggctcttgcatccgaagcttggggacacgaagcgcaagtagagcgagtgccatggctatgcgatggtcactatgcggtgagagcgtcggtgctgagccgtgagctgtgagcggtgtcttgccatcccagctaaggctatcggggccaagggtgagcttgacactgagcttcgccagctcgtcagcaagcgcttggaggcggtcggactccttgatacgaagatgagctactcccgagagcatgaatgattcacctcgaccgacgagtgctgcgacgacggcagggacgagatcggggcagtcactcatgtgcgctgtgaagtgcacgcgcttggcttcctctgcggtatgggtgatgcatatccctgcttcggtcttctcggtatgaacacccagctgctcaaagagctgtacaagatgggccgcatccccctgtagtgaggggagtgcgagtcccgagagctcgatggtagagcctatgggcaagaggctgaggagtgcataggcataggatgctgcactccaatcggcttcatagccttgatcaagaggcgatgtactgcggctatcctcttccaccttcccccgataggcgaagagcccgctgggagcttcctcccagatgaagccttgctctcggagctgggctatggtcatcagcgcataggggcgagaggcaaggccatagcgccgtgtgtcgacctcgaagcctatgggaagtgttggcgcaagaagtaggagggcactcagatactgagagctggaagaagcatccagcacacagccctgccaagcgaaggtgctgggctcgatgagtagcgggggatagccttcatagtttaggtaggtgatcttcgctccttggctacgcagggcttctaccagtggagcgatcggtcgctcatgttggcgccccgtaccagagagcctcacggggcgctgggtggtgaccgcaagataagcgcagacgaagcgcatcgccgtgcctgactctgagacattgatctcctccgctccctcttggtaagtacggagcgcagcgtgaagagctaagatatccagtggagtaccttcggcaaagtcgaagtgtggaagcttgccgcgaagcgcgtcaagtaggagggctctcgcccaaaggctcttcgagggcggtagtgtccagcgaaggtgtaggggggctgctggatctcggtaggagcgtgtgagggatgaagtggacttcactgcttcgccttggagaataggggagccaggagcagagcgatccgctcaagggcggggcgatctacttcctccgagaagtccgagagctgatcactatcgatatccaagacgcccgcgatctctcctgcggtatctctcagcggtacgacgatctcggagcgtgatgcggaggagcaggcgatatgcccagggaaggcatctacatcggggacgacaagcgtcttccccgtcagccagctcgcaccacagacccctcgacctcgtgcgatacgtgtgcaagcaatatctccttggaatggcccaagcaccagctcatctccttccaccaagtagaagcctacccagaagaagccgaaggcctggcgcagtgctgccgccgcgttggcaagattagcgatgagattggtctcccgacaagtgaggctttgtagctggggatagagctcttggtaacgctcttctcgagaggtcgcttggaggtgaagttgctctgccatcgttgcttcgtaataatggtgtcaggggtagtggctactccatctcgcgacggagctcgatacggaaggttgtgcctactcccagctcagagtgcttgacgtagatgtgcccacggtgatactcctcgacgatacggcgcgccaaggagagcccgagtccccacccacgctgacgggtcgtcaccccagggcggaagatattgcggtgcatccctctggggatgcctctccccgtatcggtgacatcaatgtagacccactgatctttgaggatgtactggaaggtgatctttcccttgccctccatagcatcgacggcgttcttgatgagattctcgaagacccatgccatgagcggctcactgagcttcacgacgatagcttcatccagtgatgtgggaggaataagctctacctgagaggaaatacgtggctgcatgtagtggatggcacgcaggacgacctcttgcaggtcagccgacttgaggttgggggacgaaccgatcttctggaagcggtcagcgatgatgccaaggcgctcaatatccttctccatttcgttggtgaccatctcttcggtccccgtgctctcaaggtactgcttccatgccatgagcgatgaggtaggagtccccagctgatgcgctgtctcacgagccagtccctcccagatgcggttctggtctgacttcttcaagctaacgagagccacgatagcgacaccaaggaagaggaagaagacagcgagctgaatgtaggggaagatgtgtagctgctggaggaccttactatcggaatagtagaggtagagtggatcggtaagcccctccatgacgataggagggtagcctgtgcggaaggctgccagcttctgatagaggaatttctccgtatcctccttcggtagctcaatattattgtagctgatgatgcgcccctccttgtccgtgatgatggtcgggatagaagggttggactcgaggatacgcgagaggtagatgagtgtggtgttgatatcgttcgtcgtggtggcctgggtagcattagcccagatctccatattcagacgctcagcctctgccatacgagtgaccaagcggtctgatgcccagagggagacgatgatgaagatgatcgatgcgatgatcatccccgtacggacgttgctgtgtctattgagccatgcgcctccgccgtgggcccactgctctcctatcttactgatgcgcataggtagggcgtatccttgggcttagtgcttgatcttattggccttcatcacctcctctgcgtagcgggcaaaagtcgccagccagtggtcaccaccatagtcagagcggaagatctgatccatcccgtgggcatacatctgagctgatgtacgagcgaagcgtgccttgagcggatgcccctggggcaggtagccagagatgcgagccatcgtccaagcacgagtatatgcaagacctaccagatgcacgatggtgtagtcggtgaggtcgctgacgacgggcttctcgcagaggcggttgatgccctgtggcgtgaagtaagttgagagccagcgtacgtactctcgctgggggagtacacgcgtcatcaggtctgctaccatcagcgtaggggagaagaagtcggtagcattaggctcccattcggctggtgccttcttgtcgccgaggtggagctgacgcgctttggcgatgagggcctgctcgaattccttgtctccacgagcacgggcaaagtcaatagcgaaggcgagtgcaaaggcggagttggagtgcgtgccgatgcggttggggtaggtcatcttgggcagataggccttccactttgtgacgatcttatccgagaggatatcgacgtgagtagcccagcccttagccttctcttgcagagccttatctgcactatgctccgcgaggtcatgtagctgttcgctgagctttataagccatgcccagccgtaggtgcgctcatagttgcccgagagcttacggtcaaagtaagccgcttctccacgcatcttctcctctgtgaagtgctcatcaaaggctgcgatgatctcgcctcgagcagagatatcggggtaagttgataggatttcggcgagcatccaatggctatgtacggagctgtgccagtcgaaggagccgtagaaagctgggtgcaggtcacgtggagtgagtcgtgcatcgaggctgtcgaggatattgtggctcgtcttattgggatactccacgaagatatttttcaggggcatcttgataagacggagtagctggtcctcgggagcctgctgtgccatgctgagggcgggaagggcacaagccgtgaggagtacaagcagagatcgcttacaagccaagtggagctgcatagtaatagtatatgaggtgttaggcgttggtgcttagcgtattcttattggggaagcccttgaagcagtgccagtagcggagcttgaagaccccgaggaaagcctccttgaagatcgaggtattcatcttcgatgtacccagtacgcggtcttcgaaggtgatgggtacctccttgatcttgaagccaaggcagtaggcggtgtacttcatctcgatctggaaggcatagcccttgaagtgtacttcgggaaggaccatcgtctcaagtactcggcgacgatagcagacgaagccagccgtcgagtccttgacaggcatgaaggtgatgaggcgcacgtagagtgaagccccatagctcatgaggatgcgatccagcggccagttcttcacacgtccaccacgcgtatagcgtgagccaacggctacatctgctcctccttcggcacatgccttatagagctccagtagcttcatcggagggtggctgaagtcacagtccatctcgaagatatactcgtagtcgtgctgtagtgaccactggaatccggcgatgtaggctgtgccgagtccgagcttgcccgagcgctccaagagatgtacccgcccaggatattctgtttgcttctctcggacgatggccgcggtgccatcgggcgatccatcatcgacgatgagcaggtggaagggctgggggagtgcgagtacggtgtcgatcatctgggcgatgttctcccgctcgttgtaggtgggtataatgactatgctatcgctattcatattaatatatggggatcgacttcctgctgaggtggagtccaattccgagccttttggtcgatgtccaaggcaaagataccaagatttggttagtcttggactgaaaaagtacgatggacttgggggggatcatgtgatgaaggccgaagtatttgcggaggttgtttgatgcgtcgctactgagtggtgcttcaaaccaatagtggtctacaatcaaagcagtattggtacaaggggcaaaccaatagtggtatgagggataaaccaatatgagacagttgagaagagtcctgtcctctcttagagtgctaagacatcgcacgcccagctccccgccatatctctccgaagtgctacacaagcccatcgccttatcgcgcatattcctcttattcagcggagggaaaagtgtccttctcgtgaagaaaaaagcgccttcacatagtggttttccgctgtctatgcacgtagtcttaaagaccaggcacgtaaatccaaatatccacgtacgtagatattagatccatgtacgtagtccaaacttacctgccactcgtccgcaacttttatccctacgcggagcaacaacctgatagaggtcactgcacaaagctatataggaatcagtccaaagttatatagtttgcttcgccatcctatatagctctacgccacgcacccatatacctattatgagagcattgcgcaagcccacctctccattactcgaccttctttcctcgaaaatcggagcctttaggttgagaagttcgaaggaggaaagtgcaagctgtaaagggatggccttgcacaatggtctcaatattgcttcgagtgcaaagtcgtattgcttcacccgcagaccactattggttagaaacagccccctgtaatagggggagccttatgaatcggggcttagggcctgaagaaagacggggcttaatgagccaatgcatagtgagctgtcgccaatttaatagcctctttccctcacttacggtccccagtcttagggtgtttaagagcgactggaggagtcttgcctattggatgtccgaagctctctgcttgctattcggtcagtagctgctatcgccttgtggaggaggggatgcatcccctatgcttatgaaaataattaattaagtcggggtttggtggggtgtactttattcgttagctttgctttgcatttgcagaacaaaataagcaatggtggcacggcatgtcctctatcactaacggtactattcctcaccagaagacacaacctcccataggtggctttggccgtgctaacatacgtattatataatttgtagtagtaaagctatggacgaacagaaagcggtcaaaacccttaaagacatcgtgatccgcttctccggtgactcgggggacggtatgcagctcacagggacgatcttctctgacctctccgccatgacggggaacaccatctcgacactccccgacttccccgctgagatccgcgccccacagggtaccctgagtggtgtatctggatatcaagtccagatcggctctcgctcggtacgtactccaggtgagaatgcggatattcttgtggcgatgaatcctgccgctcttaaggttagtgtcaaataccttaagaaggactcgatcatcatcatcgacacagactccttctccaccaacgacctgcgtaaggctgagttcctgactgaagatcccttcgaagaactcggactgaagactcagcaggtcatccctgctccgatctcttcgatcgtgaaggaaggtcttaaggactttggcctcgacgctaagtctgccctccgatgcaagaacatgtttgctcttgggctcatctgctggatctgtgatcgtcctcttggccccgcagagcagttcctcgaccgtaagttcggtaagaagcctcagctccgtgatgctaacatcgcatcgctgaaccacggctttgacttcggtgctaatactcacgcctctgccagcatcttccgcatcgaaacgcagaagcctgtaccaggccgctacctcgatatcaatggtaacaaggctactgcttacgggctgatcgcagcttctgagcaagctggtctcgaactcttcctcggtagctatcctatcactcctgctacggatatcctccatgagctcgctaagcacaaggctcttggcgtgaagaccgtccaggcagaagacgaaatcgctggtatctgtaccgctatcggtgcttcgttcgctggtgacctcgctgtgacgactacttctggtcctggtcttgccctgaagagtgaagctattggcctcgctgtgatggctgagcttcctttggttatcatcgacgtacagcgtggtggtccttctacaggtcttcctacgaagagtgagcagaccgacctgatgcaggcgctctatggccgcaacggtgaagctcctatccccgtcctcgctgcgacgacacctgatacttgcttcctctatgcctactgggctgctaagatcgccgttgagcatatgactccagttatcctgcttacggataccttcgtagctaacggttcttcggcttggcgcatccccgacctccatgagctgcctacgatcgagcctaactacgtgtctaagctccctgaaggtgcagctgagggctggcgtccttacttccgcaaccccgaaacaaaggttcgctactgggctgtaccaggtaccccaggcttcgagcaccgtctcggtggtcttgaaaagaacttcacgaccagtgctatcagtaccgacgctgctaaccacgcccttatggtcaagactcgtcaggagaagatcgactacatctctaatgagatccctctcctcgaggtcgaaggcgatcaggatgccgatacgctgatcgtcggctggggtggtacctatgggcacctctacgaagcttcccataaggtccgtgagcagggctacaagatcgctcatgcccacttcgctttcatcaaccctctgcctaagaacacagaggaagtgctgcgccgctacaagaaggtcatcatcgctgagcagaatacgggtatgttcgctcgtcacctgcgtggtctgatcgacaacttcgtgcctcatcagtacaacgaggtgactggccagcccttcagcctctctcacttagtcgaagaattcatcaaacttatcgaagaatagccctatggaaacgaatgcaaacccagtgaagttagacgctaagagcttcaagagcgaccagtacgtacgctggtgtcctggctgtggtgaccatggtgtcttggctactctccagaagtctatggccgaggtgggtatctcgaccgagcagacggcagtcatctcgggtatcgggtgctcctcacgtctgccctactatgtgaatgcctacggcttccacacgatccacgggcgtgctgcagctatcgctacaggtcttaagaccgctcgccccgatctctgtgtatggatcgctacgggggacggtgacagcctcgctatcggtggtaaccacttcattcacgctatccgtcgtaatgtagacctcaacttcatcctcttcaataaccgtatctatggtctgacgaagggtcagtattcacctacctctgagcgtggcttcgtctcaaagagctcacccttcggtacggtcgaagatcccttcatccctgcagagctctgcttcggtgcacgtggtcgcttcttcgctcgctcactggatatcgatatgaagctcctcgggcagtgtatggtagcaagtgctcagcataagggcgctgctgtcgtcgaagtcctggtgaactgtgtgatcttcaatgacggtgtgcataagggcgtagctcagcgtgatacgcgtgaagaccgctccatcgtacttcgccatggcgagaagatgatcttcggtaaggagaagaataagggtatcgtccttgatggccttcgcctgaaagtcgtgaccatcggcgaagatggctacacactggatgatgtcctgacgcacgatgctcacgaagtcgatcctaccctccacacgatgctggcgatgatgggtacgagcgatgatatgcctgtagccttcggtgtcattcgcgacgtcgaggatatttgctatgaccaggctgtcacgcagcagatcgaggaggtccgtgctcagaagcccggtatccgtaagcttgaagatgtcctgatgaaggacgcctattgggaagtaaaggaataagctactaaggcttatcctccgctataagacggcgccccctctccacgatggagagggggcgctgtcgctttatgtgtggggtaggcttagtagcctctgcctcgggctgagcgagtgataggtgtcgaggatgacttactggtagagctggcactgctatctgaggtaggctggctcttggacttagacttgttcctcttcttgggagactgcttcggctgatgtagcgtgctgtcggggagatagagctgcacctggaagtctgatagctctcgctcgatatgctcttgcgctttcttctgggcttcagggctctggtactcttgggatagcgtacgtccacgtaggttctccgtcttgactatctcccccttgtagagtcccaagcggaagaaatcaaagagcgtacctcgataggcgctgtttccctcacttagagcgatgagccccctctgtaggtaaggagccaggtcactgtacttaatccagaagagagggaggcgtagctccccatagtcgcctacacctgagaggatggggcatagggcttctacttgcgtcaagtaggtagaggtcccttcatcgaagatatgtgcttccttgatgtagtagcccttaacttcgctggatgggatgctttgaggatccccttcgatatagctgatctggaagcgctctacgaaatctttgaaacttaggcgatgtgcctcatcgaagcgctcggggccatcaaggtattcatatacggggagtctgccagcaacatagagctggaagatctgtgcgaagaggttcgcctctcgctcagtagctatttcgggactataaagcggagcattagcaggctgcataaggtcaagagctcggtagatccctcggcgccaggcgacctgatctatcgtgatggtgtcggaggatatgaaggtcttagcgcgctcagtgagcctatgattagtggcatgctctacggctttctttttctctcgtcgctccgtctgctgagtacccttgcgtacgataggggtacgaggtgcatcttgagcagagagcccaagtgaggagagaagaagggatgagatgaatatagtggttgttcgcttcattgctttcgtaggataggtgggctttggtctatgcgatgacaagctcaagagagggaagacgacgctcgacgccatcagggcctcgagcgatgatatctgtgatgaagaggcgacgtccgtggggcgtattttggatgaggcgtatctgccggtcggagaagtttgccccttgagagggttcggggagtgcattgcccagagcgtcgaaggctaagagctggaagcgcagtacgctgtagttgatatcaaggaaggagtcatcaagggctgcgcggacaccgcctgaagcaagtagagagctctttgctattcgccctcccttgaatcgggtgcttccgctccccacactgatactgagatagggcatcgggtcggggaggctacgtactcggagcttcgtctgagctacgggctggctctttcctccgacgttggctgtcacggagatgatgacttcgctcccagccttggtcgggtgagcgatccatagatctccctttcggataaggctgcccgaggagctggtcgctgtgatatcctggagtggaatgcctgggacggctatttgaatggggttgtcaatccctgcatataggacgttcatcatcgtaggggcgatggtggctgttggctcgatcaccgtgtagctaccctcaaaggggctgcgtacgatcgtcccatcattcagctcagcctctatatggcctttgatcgggaaggtgccggtcgatggtgtcgctaagctaatccttccagctgaagaggtgggcaaggcattcccttggaggtagatttttgggtgcttcgtcgtgtcaatgctgctgagtacgatggcggcttggtaagggacgccgcgtaggataatgcggctgtctgggatgacttgggccgtgagcttattggagcgatagtccgaggctcctatgctgcgtagcagttcgctgagtgtctcgccctcgacatagcgcaggctattctgcagctgggtgagctgggtgatagcggctatggctggcatgctctcaaagcactcttcttcccaagtctttccttctcgcccctcaggagtactaaggcgagagagaatcttaccctctgagttggaagacttcagtaggctcccgacccaggaggtatagctattgagatgcttgcggagctccttccccttgggatggatgggggcaagtaatacgacagaggctgctgatagattgtctcgatgctctagggaatcgggggatgcaccgcgcccatcagcttcgatggcgatggcttccttcagctgctggaggtgctgatagagtgagtcagtgcgtcgctgtagctcttggctctgctcgtagtacatgcttgccttcgcaggattggtgctgaaggcggcttgcatgtccgaggctaagcgcccattctgagcctcactggccgctgtcgcttggcgtagctctccctccactttgctgaagccatcgagtacctcaggtgatacattgagtgccatcattgcgatgaagacgatgtacatgaggttgatcatgcgctgtctattgggattgctaccagtgcctactgccatgctgaggtgggttacttcgtgtgagtcggttcgtcagcccctgaggagagtgagctgttagggggattcatattcaccgtcagggcctgtagcatgcgagcgtaggctgcattgagctgctccagctggctgatgaggcgctcattctgttggcggaaggtcgagctatccttagcaccagcctcatacatggcatgcatgtgctgtaggtctgtgctgatccgttcgatggtctccagctgagctctgagttccttgacttggcgcgtatagacggcattgagctcagtgatattgcttgtcaaggtatctgtatctcccagcccttgcagtggaaggtctgtggacgtgactaccggttggtgctgctgatggagtatagctgaagatggatatgctttgtcggaggactccgcctccttgctgcctatctctgggcgttcaaagcccgagatgaagaagacggcgaactcagtgagcatgctcacaaggaggatctcatcgccatagcgtatgtgaaggagcttgaagagcgcgcctaagatgacgaaggcagctccccaggagtagaagtagttgagtatacgcttccctcgctggctggcgaggaagcgctcgagacggcgtatagggctaaggcgcttggacataggtgggtggcttaacacaagataggagctaactacttactgaactcgacagccgagcgtacacagcggaagcctatgtaggagtgtgctgcattctgtggagccttcgtgcgattattggcgcgtatatagcgggctatatccttccacgatccgcccttgatgaccttgagggtgcggtcaatactatccttataatctgcttgataggatagctcagggttcacatcattgatgagcttgaggccggcaggagtccaagtcgtgctggtccattcggccacattaccagccatgtcaaagagtccgaagtcattgggtgggtaggaggaaactcgtgccgtgatcagatgcttgtcagccgtgtagtcaccgtctccaggcttgaagttgcccacgaagcacccgtcacatgagcgtacctcggcattgccccaggggtagctgatgcttgagttacccattcgtgcggcatattcccattcggcttcggtcgggaggcggaattcctctacgatctgaccctcggggagcttgaggcccttcttgtaggagatggtgcgccaagcgcagtaggcctgcgcttgctcccaagtgactcccacaacagggtagtcattatacccaggatggttgaagtacttggtggtgtaaatggcattagttgactgggggaaatcattgacccagacggtctcgtcggggaggacgggtatgatataggtactgaggaagtcgtactcgctacgcagcggacgggtgagcgtctcgcgtacgatcttgccagaggagtctatgtaagccgtgtccttggagatgaggacggtctcgggtcgcttcttctcccattgtggattgccctgtgcttggcgtagctgattacgccatagggctgccgcacgatggtcatagcgctcgtagcggtagtagagctgcgtaggatccagcttcttctctcctgtgacaggattggtgtagtagatactctgcagggcgcgtagctcttcctctgtagctcgcttctccgagggaatagggcggctccagtccagatgaggtgtggtgggctctccgtctttgtcttctgtgatcttgtagctctcgtcaccaccataggctgggtctgctaagcgctcacgtagtatcgagtctcgtacgtaatatacgaattggcgatactgcgcattcgtcacctcggtacgatccatccaaaaggcttcgactgatatgcctcggctcacggcaggcgttccccagagactgtcagccttagcttctccaagaagtatatgtccgcgagggatgtgcaccatcccatgtggagctggctcattccacgatgctaagcgagcagtagctactcctcccatagatgtggggtgtgaggagccacaggagcagagtgcggagcataggatgaaggcggtactaaattgggtaagtcgaagtagtaaggattgggtcatgagcattgtatcatttctcagagcagccgaatactcttgtatcggggctctgtgtgcttagtcctcccatgagggagtgtatagccgaggagtagctcgtggtaaaagctacttgatcgggtggaacgctcgacttgatagccgagggatagctctccgaggcgaaggcgggtgtgaagaccaagagcttcgcctgggcggtaggagctaccgagggctatgcgagagtgataccatagcgtacctcgtacctccgatcgccacttctcatcttggctataagagccccagatggcagggacaaaggcccaagctacagcggagccgatgtggtagctaagtgtggcactgtagcgcggaggtagctgcgctgtatagcgctctccgatgcgagtgtgcaccccgaagaggtcagtcacagcaatacccgcagagaggcgctctccatagtactgtaggcctaagctaagaccgagtgccttaccctcgctctttgtcgtagggagctcactattggtgataccttcttcaagggctttcttcccatcgaaggtaagacggtgcagcgtaccttccattcctaattgtaggcgcttcccctcggataagggtaggcaagcgctccctcgtagggagaaggtcgaatgctcccacaggtcttgctggtggtgtaggagctgagctcccactacatggcgcccaccgaggagctccagaggtaggtctgtaaggagtaggtagtagctgtgtcgatggtcttctcttccccacaggcctgcgatttgtcctgtacccagaggggctaaggctgcaggattgtagtagcctaaagcttcatcccactggcgaactaaagggcgtgactgggatacgactggctgcgctgagaacaaaagaagggcaagacaacccacgagaccaaggtctctacgcctacgaccataggtgaaggttgtcttgcccatcggatttatagcctccgaagtgaagctgactaatattcttcttcgtcgaagaagaagtcttccttacttgggtagtcgggccagatatcttcgatggattcgtatagctcgccctcatcctccatttcctggaggttctcaatgacttcgatgggggcgccagagcgctgggcgtagtcgatgagttcgtcacggcttgcgggccatggtgcatcttcgagcttagatgccagttctaatgtccagtacatagctgattggtttgtgtataagtcgttatgtgcttagcgaatatcagccgcaaaaatacgaattattcattaggtagcctatggattaggttacgatatcaaaatactaagtattccgctgcttcccacagtgattttactcttcctcccattacattatcaggtgtttcgacatcagagagcacacgcttgggtacccctctatattgtggtaagtgaagctcgtcgggagtggtcctatgaaggggaaaatcaaccagtactggtcagcgagcgaaccagtactggtcacctatacctaccagtactggtcgaagtcctgaccagtactgctccgcgcagtgaccagtactacttcgttcttatatgcatagagtttcggagtagctctctctatgagactactctgatggctttagagtatggtgataaaagttcgtgaggatagaggagctgctggagctatcgctgcccccaagaagcgcggtcaagactgcggtagtgaatggcctcagcgatgtgttccttgcggatctcttcggagccagcaaggtcagcgatggtacgagctaccttgaggatgcggtcgtaggcacgtgccgacagatccaatcgctccatggcgagacggagcttctccagcccttcggcatcggggcgggcaaagagctgcataagccgtggggtcatctgcgcattgcagtgtacctcggggtaggaagcaaagcgccgagtctgtatctcgcgtgcggctaagacacgctctcggatgcgctcactactctctgagggacgggcatcggagagcttctcaaagtccacagggacgatctctacctgcaggtcgatgcggtcaagcagggggcctgataccttccccagataacgctgtacctgctgtggggtacattcgcaggcgtgggtcgggtggttgtagtagccgcaagggcacggattcatcgctgctaccagcatgaagctggcggggtagtctacggtatagcgagctcgagcgactgtcacgatacgctcctccagtggctgacgcatgacctctaagacattgcggctgaactcaggaagctcgtctaagaaaagcactccattgtgtgccaagctaatctctccaggctggggattgctcccaccaccgaccagtgcaacgggcgaaatggagtggtgtggggcacggaaggggcgtgtcgtcatcaaggtgacgtccttacccagcttcccagctaccgaatagatcttcgttgtctcaaggctttcaccgagcgtgaagggcgggagaatgctgggcagtcgctttgccatcatagactttccgctccctggggcaccgatcatcagaaggttgtgtccgccagctgccgcgacttcgagtgctcgcttcacggtttcttgtcccttgacctcggagaagtcaaaggtctcgctctctatccctcgatagaattctccacgtgtgtcgacctcgacgatgggtagaggcacctctcctgtcagcatcccgatgacttcgcgcagggtgcgggcagcatgtacctcaagcttattgacgacggcggcttcccgagcattggcttcgggaagaatgaagccgcggtagccttcgcttcgggcttggatggctatgggtagggcaccatgaatagggcgaacggctccatcgagggagagttcgcccatgatcatatagtgctcgagtagatcggaggggatctgtccgtcagcagctaagagtcctatcgcaagaggtaggtcataggctgccccctctttgcgtaggtcagctggactcatgttgatgacaatgcgcttccctgggaacttgtatccgctactctcgatggccgagatgatgcggtcttgactctccttgatagcagtgtcggggaggccaacaagctggaagtaagaaccgcgagtacagcttacctctatcgtcaccgtacgagcttggatgctctgtagggctgcagcgtaggtcttgacaagcatggtggtatagatgttgggtagggggatggtgtttgtgttgcggtgaggtcagcgccgcttgattcgccctaaggtatcgatctggaagcgcacgggtcggtcgttcccttgtacgccgtactcccttcgcagtcgagagactaagcctaagctatcagagaaagcgataccacgtaggctgtcacggcggaactgacctcgggctgcgctatcagacggcgtagggtagaggatgacgaactggaggctgtcgggacgagccttggcttgcagcccctcctgctctcggcgggtgaggctttgcaacccttctggtgaagcaaatacaagctcaacgctgtgatgcgtatagagctcggagattgtgtgggactttccctgcagatcaaccccttcaaagggaaggacgctcgtgagctttgtcgtgtcgacctgcatcgtcgtcacttccttccaagtcttcccctggagtatatagtaatgtacgcgcgtagcaccgtcatgtgagaagaagaccgagtgaaagcgtgaggtgtcgggcgagagctggatcgtcggctcgaagtgaagtagagtgtcggtctgctgcccctcgtgtcccaagtaggttacccaagcgatggtgtcgctgggtgctaacttatccagcttgatcgtaagctcagggttggacgaagagcaggagtatagaccagctaagaggctggtagccgtgagggcaagtagagagcgtagcttattgagcgtcatgagcatcggtcttgagatcaatggagaaggtgcttacggggaggcccgtagcgcccgtgaggttagcatccgtgtaaggacgccatgcgtagcgtagacgccataggtctttccctcggagtgtaggaggaagctggagggtgactgttgcaccctgcagagagcccgtgagtggatgagtcttcccgtcgtaggtgaggacttcgaagcctctcagctctttcgcatcggatgtgcgtagctctgaggtgcctgcaaacgtgagttcgagtacttgtgcttcctggcttacactgagtagctcggggctacgtgcttcgagggaccggtagccgtattgtccagagagagcgagcagtgccaagcgatgtccgatgggatacttaatggtagggtggacatccgccttgtctccgtggtccattgagacaaccatatctattccttgacttggtcgagcaaggcgtcgctggctatcgcggaaggcggcccatgaagggcggttgatcgaggagagctggacataatagaaggggagggtagcaccgaaggtcttacgccaactcttgacaagaagcgggaagagttgcttatgtgcctcgatgttatgggcgttggactctccttgataccagatagcccctcggaatgtgtagctggagagtggacggatccccgtatcgtagagataggtcggagcgtagggatggcgagcaagaggtgtgtctcgtgcttggaggttctgcccagcgcgctcacgtacccatggcatgatgaagtcattcttcctccattggcgcaggatcgcagggagctcctgctcaagcgtggcgcggtcaatccacgcctccgtgggagagccaccgatggcattgactacgataccgacgggtatctggaggctatctctcagctcacgggcgaagtgataggcgatcgctgagatgtttgtcttagagggacgggctccttcccaggtagcagggaggtagtagcggagctgatccagggagtctaagaagctcacaggccaagctgtggcagtcgtctcgtgggcgggctgtatgttgtagatgcgcagcatgctgtcaggctgtatgggacgatgctctttatccgtgctttgactgagcatgaaagccatgttggactgcccagagcatagccatacttccccgacatagacattattaagcttgatctttcgcttgctctgtggtgtacttacctcaaggctatagggtccgccagctgattgagctgggagcgtgatagcccaagagccgagatgattagccttcgtctttccgctccagccatggaaggagagtgtgacaagttcccctgcattggctttccctcggatggtcagtggacgctggcgctgcaggaccaccccatcagaatagatggctgggagctgtagtcctccgaagtcacccgagatagcttggtaggcagtctctgcgaggaagtgcataccagctgctacggggtgcactgcatcgggaaagtaatgggggtagggatagagtggggtgtggaagtctataagctcaacatctgcactcttagccacctgctcaatggcctgctgtatctgcagctgccagtctcgcgtacccgactcaaagcgaggatgctccacaccaataggtgtcgtgcgagcgatgaggatacgtacctgaggattgacagcgcgtaaggtatcgatgaggtggtgataatcgggaatgaactcatcctgatagttcggccaattgcgagggtccgtgtcattgaccccgagatgaatcacggcgatgtcaggacggaaagccagagccttcttgtactcctcctgctggaagtaggggcgatgcccccgagcgagcagtgtagctccagacttcccgaagttctctacttggtacttcgctcccagcttctgctgcaggaggacgggataggcctcgtgctctcggtctgcgagtccatagccataggtgatgctattgccgatgcaggctacgcggatagggcctttggacttcgcagaagtggtgaagctgaggcctaagaagagggataggtaaaggccgtatttaattctcatggtgaattgcttgtcgtcagagtatgcgctgatcgtagaggcggacgatacgctcggtgagtgcatcgtcgggatccgtctggggacggtaagtagccttgaggctggcacctgtgatacgggcaaagacctgccaagtccaagccttgaagcccccgaggaaggcttggacgagctcatagcccgtcataccgcactgtcggttgattagcttgatgaggagcttcccttggttgagggtcaggtctttcatcttaggttccatatcttccttgagttccttctcgactcgcttgaggtggggctcttgctccttctcggggagggtctgcatatattcgtaggtctcgatgatcgtggccgctacgtatttggcgtagggatagaccttcttgacatcacgtatgcgccgccagagctgccgtcgctcctcgatggtgaggggacggacagtacgattggcggagatatatacctcggcaaactggatcaccagaaggctgtcattgacagcccgactcacagagtctgtgcggggagcttgcgcatgaagctccatactcactccgccgagagcgaggagaagtgaggtagagaggctgaggatgacagagcgaggcgacatagcttttgggggtatggagaattaccaagggcgaggaggcttcttggcagaatactcggtagcgagaccgcctgcagaagtctctctgtagaggctgggaaggtcatgccccgtcttgcgcatcacctcgacgacctggtcgaagctgacgcgatgacgcccatcgctgaaggtcccataggtgttggcatctaaggcacgagcagcagcgaaggcattacgctcaatgcaggggatctggacgagtccacagaccgggtcacaggtgaggcctaagtgatgctccagcgccatctctgcagagtactcgatctggaggttggagccaccgaagagctggctggcggcagcggctcccatagcacaggctacgccgatctcaccctggcagccgacttctgcgcccgagatggaggcattggtacgtactacatttgcgaagaggcctgcggtagctaaggcacgcaggatactttgttcggggaagttgcggctcatcttgaggtgatagagtaccgcggggactactccacagctcccacaagtcggcgccgtgacgacacgtccgcccgaagcattatgctcgctgacagcgagcgcataggcatagacgaggcctctattcttgatactggcagagccgtagccctcagccttgaccttgtagagagcagccttacggcggagccccaagccaccagggaggactccttctgcatttagtcccgaatggatggcttgctgcatgacgtcccaaatcttagccagatagtcccagatctcagggccctcatagtgctctacatactcccagtaggtcgtatcttcctcatgcaggcggtgcatgatatctacgatacggctatcaggatagatggtcgcagagcgctgctcgttgaagtcttcattggcgagcgtcccaccaccgatgctgaagactgtataggtgtcgaggagcttgcccgcatcatcaaagccctcgaacttcatcccattagggtggaaggggagtatgatatcaggtttccacagaatctccgtgggggctacaggcgtcagtgtctcgaggatagcagcatcagtcatgtgccccttacctgtagccgccaggctcccatagagcgtgacgtcatagcgcttggcttgaggacaacgatctctgaactgctcggcggcacgtcgcggccccatggtgtggctactgctggggccactcccgatacggaatatctgcttgattgtctccattaaaattataatcgggctccactgcggagcagggagctggtgacgagtgcttagtacacacgctatcccaaagatacaaaatcttgtacctcggcctgtttcactcaccagactcctatcataacgctctaaattgtctatagagtctaccctgatttgcttctaagaatgagcaccttcccaagcagattggggggggcttatctaagttttaggtgcgtagtggtaagtgggtggtagattggattgtatggaaatggagtttgtgcaacattggtggtgggtataaagcaatgttggagactgttgtgcggagtcctgtcctctatttattgtgctaaggcatcgtacgctcagtcccacgatatacctctccgaagtgatacacaagcccttcgccttatcgcgcgtattcctcttatccagcggaggaaaaagtgctattctcgtgaagaaaaaagcgccttcatgtagtggtattcttctatctatgcacgtagtcttaaagaccaggcatgtaaatccaaatatccacgtacgtagatattagagccacgtacgtagtccaaacttatctgccactcgtccacagcttttatccctatgcggagcaacaacctaatagaggttacttcacaaagctatatagtaatcagcacaaagctatataggaattagtacaaagctatatagctttcttcgccatcctatatagctctacccacgcacccatatacttcttatatatgaaatcattgcgcaagctgtgaagagatggactttcgcaatggtctcgtgaggtgccgtgcaatgatctcatattggatcatgctatgcgcatatcacagaatgccccctacacatgatttgcatatcaattcgtttgtgagggagagcctgccatattggcgtagagtagaggtgtggcatcctctttgaataagggaaggcactaacacgtatatccatcatacaagataaactatagactctatgagtaagcaaggtaagattggggtgacgagtgagaacatcttccccgtcatcaagaagtttctctacagtgaacatgatattttccttcgtgagctggtatccaatgccgtagatgcttcgcagaagctgcgtgcactggcctcggcaggcgagttcaagggtgagctgggtgacttgaaggtctccattagcttcgatgctgatgctaagacgatcactgtcagtgaccgtggtatcggtatgactgctgaggaggtcgagaagtacatcaatcagatagccttctctggagcagaggagttccttgataagtataaggacgacaaggtggctatcattggtcactttggtttgggcttctactcgtccttcatggtgtcttcgcgtgtcgagatacagtcgctctcttatcgtgagggtgcagagcctatccactggagctgcgaaggtaacccagaatacatcctggagaaggggagtcgtacggagcgaggaacggatatcatcctgcatattgacagcgagagtgaagaattcctcagcaaggatcgcctctcaacgctcctcaataagtactgcaaattcctccctgtgcccatcgtctttgggaagaagcaggagtggaaggatggtgcctatgtcgataccgacgaggataaccagatcaatgatgtacaccccgcttggaccaagaagccctcggagctaaaggatgaggactacattgccttctaccaccagctctatcctcagacctttgaggagcctcttttctggatccacctcaatgtagactatcccttcaatcttacggggatcctctacttccccaaggtgaagaatcagatggagctgcagcgcaataagatccagctctatgctaaccaagtcttcgtcacagaagacgtagaagggatcgtccctgagtacttgactctgctgcatggggtcatcgactctccagatatcccgctgaacgtctcgcgctcttatctgcagagtgacgctcaggtcaagaagatctccaatcatatctccaagaaagtcgctgaccgacttgatgaactcttccgtaatgagcgtagcctcttcgaggagaagtgggagagtctgaaggtcttcgtgcagtatgggatgctctccgatgagaagttctacgatagagccgtgaagtttgacctcgtcactgatatcgacgggaagcacttcacccttgacgaataccgcacccttaccgaaggggagcaaactgataaggaaggccagctcgtatggctctatacgaatgaccgcaacagtcaatatacagctatcgagcgtgctaaggctaagggctactctgtcctcctcttagatggtcctctggatgtccatgcggtatctcagctggagcagaagctcgagaagacacgcttcgtacgagtagactctgactctatcgataagcttatcgctaaggatgagcagcgtgctgtcagtctctccgatgtagagcagaaggccttgaaggccctctttgaagggcgcctacctcgtgaggagaagcgcaactatagcgtgagcctcgaagcacttggtgctgatgctgatgccgtgctgatcacgcaaggggagttcatgcgccgtatgcaggagatggctcgtctgcagcctggtatgaacttctatggtgagcttcccgaaggctacaacgtggtactcaatactgagcatccattgatccagcgtctccttgcttcggagaaggaagttgttgagcctaagctctcgactctgcgcgctgagcttcaggagcaaagtgagcttgtcgaagctgctcgcacggtgcagtcagctaagaagcccgaagaggtgagtgtggccgaacgtgaggagcttgatgctctgacgagtaagcaagccgaactcgaagggaagatttctgaggagatcaagaagttcggttcagaagagcttctcgtgggacagctcgttgaccttgcgctccttggtaatggcctactctcaggtgaggcacttgctgccttcatccgccgtagtcagcagctcctgtagtagaccaaggtatattataagataactgaggctgtgccttcggtattcagatcacatgttggttggatgctggaggcacagccttcttcattatagcagttgtacctttgtgctcatacattactatttacatgatatgcgctacctctatacatcactccgccgctggagtctctctttattgacttgctcactactggctggatcactctctgcacagacggataatgaagtgcaacccgaccgtcctgaccatagtgaaggaacaagtgtactaagcccacgacgcctacagatcgagtggggagtagggacttcctcagggtatcataacatgggactaatgcttcgctatggccttgtgcctgatcttgagctccgcttagaaggtctattgcagcggcctcatcgcggggcagtacaggtctcagatctcacgctcagctccaagcttgctctcttctctggtgatggctgggtcccagccatgacgcttgtcggctatctgaactacgcacctcaagaggaggcacgtagggtgacgggatatcttacacttgctcttgagagagaactgatatcaggtctttccctcacctgtaacatcggctcagctgaggggatgcgtcgcctctctctgaccgcagagttaggctataacttcacagatcgactaagctccttcgtggagtactatggagtctttggccctgcagagcatggatgtgacttggggctaagctatgctgtgacgaaggacttcctcatagacctctcttgcggtaggacttttttcgccagcggagcggtgaactatgcctccctcggagccacctacagactatagtttggagctagtaaaaaaggagtgagtgaaaacttttcggcacgtttcgtaagctccgatatgttgattatctttgctccataaagcaaataagctatttcgtatcaactaactttataacccccaagaaagaacatgaacattccacaggaactgcggtacaccaaggaccacgagtgggcacgcctcgaaggtgatgttgtctacgtaggtatcacggactacgctcagggtgagctcggcgaaatcgtctatgtagacgtcacgaccgaaggtgaaagcctcagcgcagaagaagtcttcggctctatcgaagctgtaaagacggtatctgacctcctcctccctatcgaaggggaaatcctcgaagtcaacagcgagctcgaagacagccctgagctggtcaacagcgatccctatggtaaggggtggctcgtcaagattaagcccgctaacgctgacgacgtagaaggtctgctcagcgctgacgactataaggctctcatcgcaggataaagatgcaagcatctccactggtcagcatcatcatgggcagtacctccgatctgcccatcatggagaaagctgccgctcgtctcgatgccctcggcattccctttgagatgctcgcactctctgctcatcgcacgcctcgtgaggtagaggagttcgccactacggctaaggagcgtggcgtcaaggtaatcatcggtgctgctggtatggctgcccatctctgtggtgtcatcgcttcgatgacttccattccagtgatcggtgtgcctatcaaggcttccctggagggcgtcgatgctctctactctatggtgcagatgcctccaggtatccccgtagcgaccgtgggaattaatgcagcagagaatgctgcactcctggccgtacagatgatggctacctctgatgaagatctctatcgtagactcgaagcctacaaggagtcgctcaaggagaaggtcgtcaaggctaatcgagagcttgcagaggtcaagttcgagcacaagacgaactaacccccgcatacacatgttgtaaacccaggaggtggaagcacttcctgggtttacttttgcattattgtaagacttattcatggcagagaatcatccctctcatactacatccgctgagccttgtctctatcacagacgccgtgcagcgttggttcatattggtgatacgcctcttggcgatgactatcctgtgcgcgtccagtcaatggcgacagcttcgactctggatacggaggctgctgtcgctcaagcagagcgcatcatctccgctggtgcggagtatctgcgctatactgcacaggacaagcgtgtggctactaacctcggtgtgatccataaagagctccgtgctcgtggtatcacgactcccttggtagctgatattcacttcaacccaacggcagctgacacggcactggagtatgtagagaaggtacgtgtcaatcctggtaactacgtcgatagtaagggtacgaccgagtggaatgatgaggtctatcgtgccatgcatgagaaggtacgcgagcgattcggcgcttttgttgagcgcgccaagacgctgaagcgtgcgatacgtatcggtgtcaatcacggctcgctctcggagcgtatggtgatgctctatggcgatacgcccgaggggatggtacagagttgcttggaatatctggatgtctgtcgtgagcatgacttccatgatatcgtcatctcgatgaagtcctccaataccgtcgtgatgactgcggcagttcgcctgcttgtcgctcgtctcgatgaattaggctaccctgcctatcctctgcatctcggtgtgacggaggctggtgaaggcgaagacggtcgtatcaaaagtgctgtcggtatcggttcgctcctggctgatggtatcggtgatacgatccgcgtctccctcagcgaagagcccgagtgtgagatccccgtggcgcgtgctcttgtggactacatagcacctcgtgagcatgtcgcgctttcggtggacggatcgctccttccctcatggaaggagtatcgtgagctaactcaagatgctcgcaagaataccacttctctcggagccctcgcaggtgggagcaacctgcccttagtgctctatccgatggagaagcctttagatctctcctcattcactcagcgtcccgatgccattctctcgcccgaaggacagcttcagctcgcaggcggtacgcctatcgtaggaatctccgtgaagagcattgctacggacgaacttacggctgagtgtcttgctgagcttgctgccgcgcctcagacactgcttcttcttgagagccgtggcgataatcccgtcgctgactggcgctggggcttcacacagcttcgccgtgcaggtgtcaattgccccattctacttcgtcgtcgctacgagaccaccgatctggagctcttccgcctctatgcagctgccgactgtggtagcatcttcctcgatggctggggtaatggtctttgccttgaagccccccatctccctgccgaagagatcatcaagaccgagctgggtatcctgcaggcagctcgacttcggatgagcaagacggagttcatcagctgtcctggctgtggccgcacactctacaatctgcagaatactatcgccgagatcaaggccgctacctcacacctcaaggggctcaaggtcggcatcatgggctgtatcgtcaatggtcctggcgaaatggctgatgcggactatggctacgtaggtgctgcgcctggcaagatcgatctctacaagggacaagaatgtattaagaagggcgtacctcaagctcaagccgtcgagcatctcatcgacctcatcaaggaaggtggcgactggaaggaccccgaataagctcgttcccttcgccttcatctctcatccccatcatttatatctctcctatgcgtgtcaagctgatcaataagtctcaccatcctgctcctcactacgccacatctggtgctgctggcatggacatccgtgctaatctctcggagccgattgtactggagcctctcgagcgctgccttattcccacgggcctcttccttgagatccccgaaggctacgaagcacagatccgacctcgtagtggacttgcactgaagcatggtattaccctgcccaatagccctgggactatcgattcggattatcgtggtgagctgaagatccttatgatcaatctctccaaggagccctttacgttcaacgacggcgagcgcatcgctcagatggtcgttgcccgtcatgaggtcgtggagtgggagttggtcacggagcttaatgagaacaccgatcgcggcactggcggttttggccacacgggccgcgattagttcacccgccctcacatcaaagatcaagccccggcttcctaatggaggtcggggctttctcgtaccaattcaaagagggtggagcttattgcttccaccacaagcgtctcgaagctgcggaatgtgggtccgtcgtctccacagcttgctcaatgtcatccggcaggtgatagaagaagtccagtccagtgaactgctccagctcgcgaatcgagagcgtcagcccatcgatgtgctcacccttgccgtagtttctgtgttcggtgaggaaggcaatgccttcgtacgtcttgcccttcttcatcagaagcgccatccagtagtagcgggggacgaccatcttacccttgatgcgctcggcctcgacctgatcatcgcggatcgtcccacccttggcgacgtagagctgatcgcagaaggcgcggtcgcgtgcccattcttggatgcgattctccaggcggtgccagatgccggcattatgagtctggagctgcgggctcatattcgtgtagtagaaggtctgctcattggcagcctgtgagaaggtgcggtcttccgaggctaccagatgtccgcggctgtagccacttcggcggaagaagttggatgtgtcatacgccgcagggatcttaggatcccagctccacgcgtcactacggcgcacgttgtcctctgccgtcgcagcgtcgaaagagaatgcaacccagcgcgaatggagctttgtgatgtcgtactcgagcgagtagtttaccttccccgaagctcggtgtgtgacgaagtagttattgttgcccccagccaatcttggtagctcaagcagggtcgtatccccattgatgatctcgtcctcgatagcgtcctgaggcgaatagcttgggaggccttgggctgaagcctgctctgcgggcgccgcttccttggtcatctgcttgtagaccaagatgcctaaggcggcgacagcgatgagtagggttagtttcttcattgaagggagtagtcttactttaaatccgctgcaaaggtagtgacttcgttcctttcctcccaagctttccctgcttcgggtcggggaggaagtcgtggagtgtccgagggaagaaataaaagaagcctaaccgcaagggaccatcgtccacttgatgttaggcttcgaccgtttaagagctcgtctgcttcgcagcttcgtgtcccgttagccttctctcgaaggtgctcaggctatagcctgcgatgtggacgagaaatagtgctctctctccgaaggtggagaggttgtttgtctgtaatacaaaggtacaaaaacggcctatatatacctaatagaggggagaattctgttgctttagctacctacttattccgatgcgggagtcttgctgggtagaattgctggcgaagtagaggaagatgctaccgtgaggaatatacctttctgtcttgaggaatatacttttctgtcgtagggtatataccattagctcgaagggtatataccattagctcgaagggtatatactatttgcctcaagggtatatacccttctgcaggatggtatattcctttttctcggggacttcctctgagcgcagatcaagagagggggcgaagacgcagaaagggctctccctttcctttcggaggagggagagcccttggtgtaaagtgcagtgaatgcgcggcagaagcctattcgatagcggcttgggccgcggagagacgggcgatggggacacggaagggcgagcagctgacgtagctgagaccgatgtgatgacagaacttcaccgagtgaggatcgccaccatgttcgccgcagataccgcagggcaggtcggggcgtgtgctgcgtccgcgttcgacagccatacggatgagctggcccacaccttcttggtcgagttcctggaaggggtctacgctcaggatcttcttatcgaggtagacgggcaggaagctggcgatgtcgtcgcggctatagccgaaggtcatctgcgtgaggtcattcgtcccgaagctgaagtactcggcgtggcgagcgatctggtctgccgtcagcgctgcacgagggatctcgatcatcgtaccgacgcggaagtggagttcaactccttcttcagcgaagagctgaagagccgtatcgcggatgaccttctcctgctcatcgaattcattgacgatcccgatcagagggatcataatctcgggctgtgggtcatagccttccttcttgagctgaatagcggccgagaggatggcacgagtctgcatcaccgtgatctcagggtaggtgttgccgagacgacagccacgatggccgagcatagggttgtgttcgctcagcgaattgacgcggcgctggatctcttgtaccgagatacccatctcatcggccataatctgctgaccagccaaatcgtgggggacaaactcatgaagtggtgggtcgaggagacgcacattcacagggcagccgtccattgacttgaggatgccgtagaagtcttgcttctggtaggggaggagcttagccaaggccttttcacggccttccttcgtgtcagccagaatcatttcgcgcatggccttgatcttctcattctcgaagaacatatgctctgtgcggcaaagaccaatacccacggcgccgaagctacgggcaatagcggcatcgtgtggagtatctgcgttcgtgcggacgacgagcttcgtgtacttttcacagagggtcatcagctctgcaaagtcacctgtgagctctgcaggctgtgtcttgaccagaccctgatagacttcgccagtgctaccattgagcgagaggtagtcgccttccttgagtaccacgccgtcgatctctactgtgcggtgcttgtagtcaatgttgatggcgcctgcaccagatacgcagcacttacccataccacgggctacgacggcagcatgcgaagtcatcccgccacgtgcggtgagaataccttcagcagctgacatccctgcgaggtcttcgggggaagtctcgatgcgaaccatgatcacacggcgaccatcgtcatgccagcgagtagcatcatcagcgaagaatacgatctgacccgaagctgcaccaggcgaagcgggaagcccgtgcgtgaggaccttagcttggctcttggcgacgggatcaaatacggggtggaggagctcatcgagcttgtgaggctcacagcgcaggagggcggtcttctcatcaatgactccgtcgcgaaggaggtccatagcgatcttgaccatcgcagtaccggtgcgcttcccattacgagtctgcaggaaccacagcttgccgtcctgtaccgtgaactccatgtcctgcatgtccttgtagtgggcttcgaggcgctgctgaagcatatcgagctcggcatagatctcgggcatagcttcttccatcgatgggtagaggctggcacgcacctcttcgctgatgccctgctggtgtgcccagtcgagagagccagccttcgtgatctgctgaggagtacggataccggctaccacgtcttcgccttgagcgttgacgaggtattcgccgttgaagacattttcacccgtaccagcatttcggctaaagcaaacccccgtagcagaggtgtcgcccatgttcccgaataccatagcctggacgttgacagctgtcccccattcagcagggataccttccatcttacgatagaggatagcacgctcgttcatccagctatcgaagacggcgcagatagcaccccagagctgctccataggatcagtggggaagtccttgcctgtgcggcgcttgatctcttgcttgaagagtacgaccaggctcttgagttcgtcgacgttcagctcattatccaggcggacgccacgctgtgctttgactcggtcgatgatttcttcgaagggggcgatatcttccttcgtctcgggcttcatgccgaggacgacatcaccatacatctgtacgaagcggcggtagctatcgtaggcgaagcggggattgcctgtcttctttgcaaggccttcgacgacggtgtcattgagcccgaggttgaggatggtgtccatcatacctggcatggaggcgcgagcaccagagcggacagatacaaggagtgggttggtgggatcgccaaaggtagctcccatgaggccttcgatatgatgcactgcgcgcatcacttcgtctgagagaagggagataagtgtgtcctttccacgggcgaaatactcattacaggtctcggtcgtgatcgtgaagccaggaggtactggtaccccgatacgattcatttcggcgaggttggcgcctttgcctccgaggaggtttctcatgtctgcagcaccttcggcgaggccgttcccgaaggtatagactcttttgttgtctctcattgttagcaagtgttatgcgttggttatgctaatccataggcaaatgtatcgattattatggataatcccagcggtgtgacggaatttattaaacgtaggtaccgaattgattgctcttttattaaatgtgggcttgtggtagatgctgtgattgctgagttttggtcggatatatgctgtctttcataaataatatgatatgatgtaaaaggaagcaccctcatcttctacccaaggaggatagaggatgagggtgcttatgtgatagcgtgtagctcgcgtgggggagctatcgagaacttagagagcgtattcgttcatcttgcagaggtacttcccgacgatgtcaaactctaagttaaccaccgtgccgacttgtatgtgcttgaagttcgtgtgctcgtgtgtgtaggggatgatagcgacgccgaaggaggtcttctccgagttgcacacggtgaggctcacgccattgaccgttattgagcccttctcgactgtgatatagcccttgcgagcaagctctgcatccgtctggtgctcgaagcgatagagccagctgccatcagcttcttcgactgaggtgcagatggcggtcatatcgacgtggccctggacgatgtgtccatcaaggcgacctccgaggagcatgcttcgctccaggttcacaaggtctccgacagagagcttaccgaggttagagcggtccagtgtctcttggatggcggtcacggtgtaggtgtgctcgtcatgagccacgactgtgaggcataccccgttgtgagcgacgctttggtcgatcttaagttcgctggcgaaagggcaggagagtgtgagatgaaggttttcgccttcgcgtcggagagcgacgacctcgccgcaagcttctacgatacctgaaaacatagtctgtatatgatgagtgttagctgtcgtgagaattgacgctacaaagataagacaactcccttagccagcctctctattgaggtgatgatctctatatgtatatgtataggggagtggtgtgaacctatattggtcgttgggtgaacctatagtggtcgccatgacgacctatattggtcacgacgctgaccaatatagattcacctcgcgaccaatactgcttttacggggcatcctacgaaagcacttgaatccttaccgtcaagaggctgaggaagccaatagagaggaaacaataaaggcagtagtcactactgaccactgcctttatcttgatcttcttggtcgggatgagaagactcgaacttccgacctccacgtcccgaacgtggcgcgctaccaactgtgctacatcccgaatgcactcagcgacttcccgccgagccgctgcaaagttagataaataatcagtacgatgaaccgtggaaaggcgtctatataagcgctccctcctcgatacgaccagagagcttctggtgcattgccgtagctgctcggcgaccgtctcccatagcgaggatgaccgtggcggcaccgcggacgatatcaccacctgcatagacgtcgggcatcgaggtcttcttaccctcgtccacgacgatattgccccacttgttgacctccagctcaggcattgacttagtgaccaaggtacttgcggagtagccgatacagatgatgacctcatcgacggggactgtgatgatctccccagtggcgaccggacgacgtcggccactctcgtccggtgctcccagctccatacgctccaggcgcatcgcagtgacgtggcctgactcatccccaagatactccacgggattgtgtaggttgaagaactctgtaccttcctcacgtgcatgcttgatctcttctgcacgggcgggcatctcttcttcgctacgacgatagacgatggtagcctgcttggcatcgagacgaatggcagtacgtacggcatcaatagcggtattcccaccgccgatgacagccacacgcttcccacgtagggaggggagtgcttcggcaagctcctcgggggacatgagattgtacttagccagatactcgctggcggtatagacccccttgagatcttcccctgggatacccatgtagttagcgacaccgacaccagttgcgatgaaaatgccatccattccatgggccttgagatcctcataggtaatagtcttccctacgatcgtattcgtttggaaggtgacaccgagatcgcgcatcttgtccagctcatcctcgatgatactattgggcagacagaactctgggatcccgtagcgcaggacgcccccgagctggctctcggcctcgtagacggtcacatcatagccccacttagccatgtcggtagcgaaagatagaccagctgggccgctaccaacgacagcgatacgtcccagcttgggcttatctgagtgcttgggcttggtagagtgatctcgatggatgcgctcgtagtcggcgacatagcgctccaggttgccgatggagacagcttctttcttgaggctgagggtgtagatgcactggctctcgcactgcttctcctgtggacagacacgaccacagactgcggggagtgagctggtctcacggatgataccaacggcctcaagcatctcacctttctcgatgagcttgatgaaggacgggatatgaatgccgacagggcaaccctcgacacagccgggattagggcagtctaagcaacggcgagcctcagccatcgcttcttcgcgtgtgtagccgaggcttacttcttcatggaatgaggtgatacgctccgctatagggagctcagacatcttcgtacgctcgtaggcgatacgctctttattgggatgggctttgcgtagctctgtgcgccagtcctgactacgccgctccttgattagctcttgcttggtcattgtatcgggtgatcttgtacagtgttacctcgctataagtgataaaatgttagggcaaagataagcaaagaagaagaggagggaaagagcctatctatacagaacaagtgaggccaagatctcagtcagagcatagctcctcgagatcttggcctcacgatgtatgtgatcgggtggggtcaagcacccgatgaaaggtgtactctacttgttcaggatgtcgtaggtgtcacgagcgatcatgtactcttcgtcggtagcgacgacgacgaccttgacacggctgtctgcagcactgatgacctggctcttgccaccataggtgacttcgttgatagactcatcaagcttgatgccgaggaactccagcccttgacagacttctgtacgtagagcagcacggttttcaccgacaccagcggtgaagacgaggaggtcgataccgcccaaagcagcggcataagctcctacatacttcttgatgcggtaggcatgcattgagatagccagacgatcgcgcttagagccttcttcggcggccttggcgacgtcacgcatgtcagagccctgtgtgctgataccagcgacaccgctcttctttgtcagaaggaaggtcaggtcttccagatcaaggtgggtcttaccaggggtagccttcttgaggaagggtgcgaggaactctggatcgtagtccttcttattcatcaggtactcgatgacgccgctgtcgatgtcaccagcacgagtacccatcataaggccttcgctgggggtcaagcccattgaggtgtcgatactcttcccgttgagtacagctgccatagacgctccactgccgatgtgagctgtgacgatcttgcatgaagcacgatccagccctgcgatctcagcccccttggcgctgacatagtcgtgactcgtaccgtggaagccatagcggcggatgcggtatttgtcatagaattcgtaggggagcccatacatataggcatgctcgggcatcgtctggtggaaggccgtgtcaaatacccctacttgaggaatcttggggagtaccttcgtcacggcttcgataccgaggatgttggctgggttgtgaagcggagcgagctgtgcgcactcatggagcatatctactacctctggggtgatacgtacgctctgtgcaaagcgctctgcaccgtgtacgaggcggtgaccgatggcgtcgatctcatcgaaggactctacgaagtgctcttctttgagaatgtcgaggataatctctacgccgcgtgtgtggttaggaatgtcaaggtggcgctcgatcttctttccttcggggttacggaaggtgatgaaggagtcgttgatccctacgcgctcttcgttccccgaggtcaagaccttgtagttggggagctcgatgagggcgaacttcagggaggagctgccacagttgaggaccaggattttcataaggtgttgtattatatggtaaggtgtgagcttatcccttcttcgccttgagagcgattgactggttggctgtgatagctgccatcttatagatgtcgtctactgaagccccacggctgaggtcgttgactggtgcagccataccctggaggacagggccgacagcttcggcaccagcgaggcgctggacgagtttgtagccaatgttcccagcttcgagggtggggaagatgagtacgttagccttacctgctacggggctgtctggagccttgagcgaagccaccttcgagacgagagcagcatcaagctggagctcgccatcgagctggagctcgggggccatctccttggcgatacgtgttgcttcgacgaccttatctactagctcatgcttagcgctacccttcgtcgagaagctgagcatagcgatgcgtggctctacgttagcgatagcgcgagctgattcagctgaggatacagcgatctgagcgagctcttcagcggtaggattgggcatgacggcgcagtcagcaaagagcagaagcccgttttcgccataggtgttgttggggaggaacatcatgaagataccgctgacgcagctgatgcctggggtcgtcttgacgatctgcagagctggacgaagcacgtcgccagtagcattgatagcccctgcgagttcaccatcagcatccccagccttgatcatcagacagccgaggtataggggatcttcgacgaggactgcagcctgctcttcggtaagtcccttcttgcggcggaggtccagcagaaggtcaatataggcctgcttcttttcgtggttcttagggtcgaggaggttcgccttatcgatgttttgcagacccaattcctgggcgtgcgaacggatggcgctgggatccccgattagggttaggcggacaacaccttctgcgaggaggcggtcagcagccttgagtgttctttcttcggttccttcagggaagacaatgtgttgaggattagccttagccctgctgataatgtcttggatcaagtccatagtgatggtagatttgatatttgagtattctgtatatccccaaagttacggattatctcgctttattgtgcaaggcgctcggagtcacggctccacgctttgctctcccaactctcaagacactctttttcgcaggatttttcgctctattatgaatgctaatatcgtcaccgcaatatgctgtttctcagtggggaaagtgggctttggcgacgcttgtttggtagctcgattttgtgaccagtactggtccacattccgaccagtactggtacacaccttctacttgtactggttcgcgttctgaccagtactgcttcggttggtgaccagtactggttcgttttatgcttctcaaagcccttgcaggaccaccacctgaagaaaaagaactcccccgatagatcactggatctatcgggggagtttcttgggataatgatagtggggctagattttactcgcgctccttgatcaggccatgacggtaggcatggaggagcttcttgagctcttcgatctgatcctcaaggatgaggccttggtcagtgtctcggacaagtatgcggtctgtggagtaggccttgacaacagaggtgctggagatgtcctccatgtgctcaatggcttcgcgggtcgagctgaagggctcgtgcttgaccagatgaaggccctgtgaattgaagatcaaggtatagcctgcgatacccgtgctggactggtaagctcggctgaagccgccatcgatgagcataatcttaccaccagcctgtacgggatgctcgcccttgacctcacggacggggacgtgaccattgatgatgtgagactcggtgctctttaggtcgaactcttcgaggatcatatcacagacctgctcctcagtacggtagacatagtagtagcccttctcttcgtggtgcgtagccttatcggcgatgaagtagcgctcgaaggtcgtcatcgcagacttatcaaagagaggtgagtcggggccacaccataggtaccacatatagtcaacagcttccttgtgctcggggtgatcggatgatgaccagtgcgactggcgtacgaactcatcgatacggtcgaggagggcacgaccagagaaggcgcgaccacgaatcttgaccttacggaaggtgcggtcctcattgagggggacggaggcgtggaagaggaggttgtggttgcacgtaaggtacatactccccttcttgaagaggaagttgatgtggcggagaagcttctcgctgtgacggaaggagtgcaggagcttggctacgacatcagcctcagcctcggtgagcttgtagggatcgttgggatcaatagtggggaagaaggtatccttgaggggataggtctctccattggggagggtaatcgtcccttctgcttggttgatgcggtgcagaaggtcacgatcctccatcccatactcggggtgacgcgctatgatctgatgctcgagcttgaactgtatgatggcgatcgccttgtgcatctgccccatgaggagaatgctcttctcatcgtaggtctcgtctgcatcgccgagcttgggggtaaagggcgtacaaggatccttgccatagacctccattgcgaagcgcgccagaggaagcatgttgatcccgtagccattctccagcgtggagaggttggcatagcgcagggcgatacgtatagcgttggccatgctggcggtgttccctacagcagcacccatccagagcatatcgtggttaccccactggatgtcgacattgtggtaggtcaggagcttgtccatgatgaactgggcgccaggacctcggtcgaagacgtccccgacgatatgtaggcggtcaatggccagacgctggatcgtctcgcagatcgcgatgatgaagtcgtcggcctgccccgtatcgatgatcgtgtcaaggatagctcccacgtaagccgacttcttgggattcatgctatcctcatgagtgagttcctgagtgatgtagctgtactgtgcgggaagagccttacggaccttggagcgcgtgtacttctcgctgacgcactgcaggaccttgatgagctggttgagcgtgactttgtaccaatccttacggagataatgctgctggctgagtcgctcaagactttccttagggtagtagatgagcgtgcagagctgacggagctcctgctcacggatttgtccgaggaagaggttctctaccttgatgcgaattgtccctgatgcattcttcagtacgtggatgaaggcttcatattcaccgtggatgtcggcgaggaagtgctcggtacccttaggtaggttgaggatagcacttaggttgatgatctcagcggcggcagaggctgcactggggtattgcttggagagcaacccgaggtacttgagttcacgttctgtgatattcatagtgatgataagtgttgggggtgattattataggcgggaggtgagctcggcatgcttgacaccggaggcactgcgtatcttcttgatgagtacggtcagggcttcgcgacgctcgacatagagtacgaaggagccgtggaagaggccgtccttcgactggatcgagtagctgcggagcttgactcccgattctttacgaatgagagatgtgatgttggtggcgatggagagctcgtctcgtccgacgacttcgatggaggcgacctgcgagctaccgctttcaccattccacttagcacagatgatcttgtgcggagagtgggcaaacatatcgggtgcattggggcagttcatgcggtgcaccttgatgccgcgggtcgtcacaagcccgaagacctcgtctccatagaggggacggcagcactgggcgaggctataagcaactcctgtgagccctctgtcgaggatcagcacctcggaggtgttgatctgattggattcgctctcgctctcctgataggtgaagtcttcggcagagcgagcggagccaatggagggctgcgcctcaatgagcgagactgcagccagctcctgctcatagaggttgaggaactcctgtacatcgaccttactgtgtgttaggtcgcggtagaagtcggagagcgtcttgtagcctttacgtagggtgatgcgtatgaaggcagcttcatcgaaggggagcttgcggttcttgatgcggcgctggatcatctccttggcgacaccgataccagcctcttcctcggcgcggagcagctgacgaatcttagcttttgccttggggcttacgacgatggagagccagccgggcttgggggactgctgcggagaggtgaggatctctacattatctccattcttgagctgatggcgcagggggacgttcttcccgttgaccttcccagatatagcgcgagctcctactcggctgtggatggtgaaggcgaagtcaagtagggtagcaccttgggggagcttcatgatctctcccttcggggtgaagacatagatctcctgtgccttgagtgtaaggagggaagactccagagtctgtcgcttctcctcttcgcctgtggcatcatcacgtacggtctccagggcttcgcgtacggaggcgaggaagtcatccagaccaccttcactgcggatgcccttgtagcgccagtgggcagcgacaccttgctcggcgatggcatccatacgcttggagcgtatctgtacctctacccagcggttctccggtccgagtacggtcgtatgcagactctcatacccattactcttggggatggagatccagtccttgagtcgctcggggttggggcgatacatgtcggtgacgatcgagtagatctgccagcatacctgacgctcgcgctcgggagggacgtccacgatgatgcggatagcgaagacatcatagatatcctcgaagggaagcttcttcagcttgttgctgatcgagctgacgctcttcacgcgtcccttcatctcaaagggtacatcctggaggtctcttagcaaggtctcccgtacgacgcggatgaattcggcgatataggcatcacgtgcatccttcgtctcacgtagcttgcgggtgatgaagccgtagatcttcggctgcagatacatgaggcagaggtcctccatctcgcccttgatcttgtacagcccgaggcgatgggcgataggggcatagaggaaggacacttcggatgccagctccttgcgatcctcagcacgacggatcatcgaggcatggcgtagtaggtagaggcggtaggcgatgatgatgagcaccacgcgcatatcctctgccatcgagatcagcaggttgtggaagttctccgagctgatggcctccttgcgcatatagagctcggaggtgcgggcgagtagctgcaataagcgcagtacctcttcgccgcagacgctcttgatctcattgggtgagatgcgcccagcggagaagggtatatataggagtacagcgaggatcgaatggacattgagcccgagctctctgtggatgaggcaggcgacctccagctgcacgatgaagttggggatggtgtgtatctcctcagcctctgagacaaagaccccctgctcgagggcctcggccagccacgtccgtacctgcaggcggcatactctatccaggcgaggctggaggaggccgagaaggtagcggctggtacggtaaatctgttgctcttgggcgggactaaacatacgttactctgctgcggagtgtgataaaacttcgtttggcgaaaggtacgaaataaacctatacgagtggaggctaccctgctatggcaagatagcctccatcaatggtgagacccctagatgtggatatgaggctacatacgctcgggcatctcgatacccaggagggagaagccagcggcgatcgtgcgagcgacgacctcggagagtgcaaggcggaaggcgcgcagctcttcgttctcctccttgaggatggagaactcgtgatagaactgattatactccttcacgaggtcgtagacgtagttcgcgatgacagcagggctataggtgcgagctgcttcctctacgatgtctgcatattcagcgaccttagcgatgagctcctgctccttggtggagatggtaagcccagcgaaggtcgcggggagagcgataccctgctcctctgctttacgaaggaggctgcggatacgagcgtaggtgtactggatgaaggagcctgtgttcccgttgaagtcaatactttccttggggttgaaggtcatgttcttgcgagggtcaaccttgaggataaagtacttcagcgagcccagacctacacgacgagcgacttcggcggcttcttcagcgggcatatccttgcccttaccttgctcttcggcgatggcacgggccgtagcgaccatctcgtccataaggtcatcggcatcgacgaccgtaccttcacggctcttcatcttgccgtcggggagctcgaccataccatagctgaagtgcacgagccccttaccgaaggcatagcccaggcgatcaagtaggagagagagcaccttgaagtgatactcctgttcattgcctacgacatagaccatcttatcaatggggtgcttgtcgaagcgcatcttcgccgtaccgatatcctgcgtgatgtataccgaagtaccatcagagcggaggaggatcttgcggtcaaggccttcgtctgtgaagtcggcccataccgatccgtcaggatcctggacgaacttgccttccttcagaccgcgcaagacttcttccttaccgaggaggtaggtctccgactcgtagtaaatctcgtcgaagctaacgcccatgcgcttgtaggtctcgtcaaagccagcatagacccaggagttcatcctgctccagaggctgcggatctcttcatcaccatcctcccagcggcggagcatagcgcgagcgtcagccatcagaggagaagctgcttcagcttcttccttggtcttgccttcgttcatgagagccgtaagctcggccttgtagtgcttgtcaaagaggacgtagaagtcgccgatcaggtggtcgcccttcttccccgtgctctcgggcgtcgcaccattaccccagcgctgccaagcgagcatggacttacagatgtggatcccacggtcgttgacgatgttggtcttgaagacgcggttgcctgatgcctcaaggatacgtgcgatgctatacccgaggaggttgttacgcacgtgcccgaggtgtagaggcttattcgtgttgggcgaggaatactcgaccatgacgaagggggcatctgccgtagcttgcttatgtccaaaggtcttatcactgcggatcgcattgaagtcctcgacccaggcagcaggtgcgatgcttagattgaggaagcccttgacgatctgaatgccctcaacgaggctgcaatgctcctggagataggcaccgatttcttgtgccgtagcttcggggttcttgcgggaaatcttgaggagagggaaggctactaaggtccactgaccctcaaattcactgcgggtcttttggaattggagttgctcgggcgtaggcatctgcccgtatagagcctgcacagcttcagccgtcgcctgctgcagggactgtatgatcgacataagcggtagatatatttgtgataagtggcggggatagtcgcgagaggtgcgccggtagatccccgctttatagaggtacaaaggtagtattaattaagtgtttgctgatggataatgcttctccttattcaaaatccaagtggcagctaagtctggtgtgtatgtgtatagaggaagatatctccattgcactcccctcagtggaagcttatcctcttttgctggggtggggaggtcatagataccctgtctacattctctctttgtgcgtgctaaaagaatactaacggaggctcaggtaggcttgataaacgaatatcttagagggatggggtaatcatatgcaaacgaatactttataatgaagtgtgttcagaagccttgccgtctttcttaagaagatagtatgagcctatataggtccgctctgtgacctatatgggtgtgtgggtagagctatataggatggtgaagaaagctatatagctttggatcgatccctatatagctttgtgaagtcacctatattaggttgtttctccgcgcagggataaaagttgtggacgagtggcagaaaagtttgggctacgtgcgtggctctaatatctacgtacgtggatatttggatttacgtgcctggtctttaagactacgtgcgtagatagagaaaaaccactacgtgaaggcgctttttttcttcacgaaaacaacactttttcctccgctggataagaggaatactcgcgataaagcgaagggcttgctcggtcacttcggagagatatatcggggagctgggcgtgcgataccttatcggtttgtacacgggacaactactgctctgatggcaaacgaatacgactgtatatctgacctctatagcatcactcccgcgactcttagagaaggaggttacgtgctgtggtttttctttacctttggatatgtgataagccctctatcattttgattttatgagggctgacttctcttaaagcaacctctatgaaccgaactcatatcgcgctgctctttgcaatcttcttctcggtcacggcactctgcgctcagtcccatcgcttgatgctcgatgtcgtgggtatgaaggagaagaaaggcaacctccttatctccgtatatgactctgcagaagactacctcaagaagcccgtcaagacgctgaccactcctgccgatgccttgacgaagcgtgttgtcctcgagctggagtctggtacctatgctgtcgtcatctatcaggatctgaatagcaatgggaaggtggatcgcaacttcttccgtctgccgactgagccttgtggcttcagtcgtgatgcgcgacctaagatgggacctccccgctacaagcctgcttccttcactcttagcgaagacacagagatgagtatcaagctgaggtagtcatccagcctgcagcttcttaataccagcaagacatgtatagaagcgtcatcctaagtatcctcttccttctcgtctgcagtgtgcctctgcaagcacaggagccgcatgaactccaagggagagtcctgaatagctcggataatccgatcgcaaaggtgcagatccttgatcaagcgacagggctactgctcaccgagacggggaagggtggggaatttcagctcagcttccccgatagtgtagagcgagtctcgctggtcttcctagccgaaggctatcagtcgaaggtgatgctccttcgcccttcatctcagctctatcggatcatcctctttgaggcgcagcggtcgatcgagggagtcaccgtctcccgccgaaggcttctgccgatctcgggctatgctccacttacctctcgcttcacgaccatggatatactcatgacaccacgagccctcggtgatatcctcggtggactgatggaggatcccgatgctcagagctccgacactgatgggcgactcagtctgcagggcggtgcacctcatgagagccaagtctatatcgatggcttgcgtctacctaatccctacagcatcagctccaagaattcatcggtacgaagcatcctctcaccaagcgaatgcaaggagataaacctcctctctgggggctactctgcttcgatgggacaagcgctctctggcgtgatccagatcttctctcgggatacgaaggatgtcaagcctgggtgcttcgtaagtctgagtagtataggccctagcttcacatgggggctgggagcaccttcctcctctacgaagctggagctctcagccagctacaccgacctctccctctatgatcgagtcctgccaagtgcctacccttatactcggagcttctatagtccttccctcaccgcttccctctggcatgatcttcctcaagcgacgctcaaggctcagctgagctatacagggatgggcataggctatagacctaatgcctctatgcctacattcaatagccgccttcgcgaagatcgctactatgggcgtctgacctatgtgcgaagcctaagcacagcgtgccagctggaggtaggtgctcatactcagtactccgacttctcgggctcatccctagtatcgccacaggaccaagttcttgatcatgacctctacgccgaagctcgtcttgccctgaagtacagcggagagcccttctccatcctcggcggactcgattacagctggagggactatcgtgagacctacgaactcacaggagatcgatatcaactgaacttctccaatcatctccccgtgtccttccttgaggtcagctacctccaccgtggcctaagcctcagcgcagggcttcgcggtgagtatgcgagcgtcctcagtgtatggagtctctcccctcgcctctatgcaggctacagacttggcagacacgtcttctccgcttcgtgggggcgctacacccagcttcccgagaaggagatcctccgcttcatgccagcgctcaagagcagccgatcggagatctcccagctctcctatagctatggcgacaagacacctctcctgcagctctccctcttctacaagagctaccagcatctcacccgcagtctagcagagggctaccccaagcacttcgacgaccaagggggaggggagacctacgggcttacgctcttccataagggaaacctcggaagtatcaattattcgacttcttactcctatacccaagctcggctgagctatgatcgctacctccgcccacttgcccccagctatgtgagtcctcataccttccgcctcacggctaagtactggtcggggacgctgaagagtctcctgggctgtagctactacatagatgctggggcgaagggctatagctatgacctcacccccatccagctccctatgcgctctcggctggacctctcttggagctacattgcctccaagaaggtgcttctccacctgggatgcaccaacgtccttgggacgacgaactactggggtatcgagcccgatccgcttagccccacagaggggacgcgtatctcgacaccctcctcacgcttcttctacatcggctgcttcatcaccctctcggggaagcagaagaagactccttgatgatcactctatccacctcactttaattctcttatgatcatgcgacaccttagacacctcctgcccctcctaactcttgcgctggggctcctctcgccttcactcaaggctcaaggcacagcggagaagaagacgcctcccactcatcctctgacgctcactgtcgacggaattatcgaacccaagggagagctactcatcgccatctacagttcagcggagagctatccccagagcccctacaagacggctatggcaaaggtcgactctctcactaagacggtcctcattgacctccccgagggttcctatggtatcagccttttccaagacgtcaatgggaataagaccctcgacttcaatggctatatcccctctgagaagtatggcttcagcaataatgcacctgctgactatggtctcccgagcttcaaggatattctctttaccttcaaggctggagatatccagtatataactctgcggtagcttgagcctacgcagaatgagcccccttcgcccgtgtggtgaagggggctcttttcgtttcagcctaccaagaggggcgtgctttatcgtgaatcttttgggcctgtagaatagacgctccatatttgtctggagataaggtttatatagggtaggaaaacgaaccagtactggtcgatttgaggtgtcgctataagtcgcagctatcctctatggtaacttgcttgtgtgtagtgcgataaatgatgaatttcttttgctgggcaatcactgatatttgcgagagagcgatggtgggatgcttatgtatggtgagggtgctggatgggcggtcgggaaacgcctcggaatacgtatatttgttcctcaaaggactggccgctcagaggctggtcgcagtatcttgcttcgcttagtactaccatattatatatgcagtatcctcttcctcgctttgagcatcttgctgccctgcgtcaggcttggcagctcctcaagcagaataagtccctctatcgctatcccctcatcatcagccttctcacgctggggactctgggatatatgttcttctctggacacgcttcatcctcttctctggcgtcctatcttccgctggtcgtcgggacgttgaatgggatcttgacttacctcttccttatgcgggtggtgaagttcttcgctggcgaagcttatcccgcgcgtactcgtgtagcccgcctgaagcacttcgctggcttcgtccttctggcggtactctttggcttgggggctggtgtgggcttagtgctcttcttcgtgccaggcttttacttcctgaaccgctgcttcttagcacctatgctttacctcgatggtaaggcgggcatctttgcttccttccgagggtcgtggacgcgtacgaaggggcacttctacacgctcctcagtgcacttggtatcgtgcttcttctcgcggctgtgaatgctgtgacactgcagctggccacggtcatcatcctgcctgtcgcgaccctctacctcttcatcatctaccgctacctgcaggagatcccgcaggataagacacctgctctctaagctgagatgaagtctccgatcacgcttcgtggggtcgtccgacgcctacaatactccaagcgcctactcatcaaccgccgtggggatggcgttcattccccctttgccttccacttcatcactcgagtcgtacgaaatcgtcgtccatactactgctttgaagagcttcgtggcgaggtaaagcgccgtagaaaggacgcgaagacttgtcctcctatccatcgagcgcgtacactggagctactcttccgtacggctcacgagctggaggcaaagaatatcctcgtcgtgacctctcagcctacgacgagcctattgcccgattacctacgccatacgggctatgccgaagccgtacacgtgctttcggtggacgaactgcaaggcgtgagccttccctactatgatcttctgatctgcgaatacctacccgaacgggaagcattggagcagcttctcagccaatgtgtctctacctccccgacgcttgctgtcgcactctatacgcctagccctcgctggcgtcgcttcgtcagtagcctcgataagcaggtcgctccacgcctcgcgctcgacctgatggatctctgcctgtacttctatgacaagcgtctgacaccatctcgatacaagggggtgtactaagcttcccttactaactcaattattacctatcccattcactttagatgaaacgactaacttaccacctttgccttgttctgggtacgctctccagctgtggtgcttctgctactcctactgcccccgagcccgagaaggctcagccccctgtcactccaggcatccctacagtacgcgccagcgatgagaccgtgcagaggtacttcgccgcaactctctctggcaaagaggaagctttacctgtctcttccctctcacttgaggatatcaagaaggcgcgtactcaggtatggcgtctctgggcagaagcaaataaatcccagagtgaagaaaagctaccagcactcacgcccctctctaaggagagtgtagctcatagctggcttctaaaaccagagatctataatggggatagcattaaggccgtgatgcctttctactacggctcgaagggagataagccagaagctggctacccactctatctctatctgcacggatcgggggagaagaagggggaatggtctacaggtttggcgttggctctctcttttcaggatagcccctccgcctacttcatcccacagatacctaatggtgaaggcgtagcggatggtcaactctaccgctggtggcagaagtcaaagctcgaagcgtgggagaaactcctacgtcaagccttcctctctgatcagattgatccgaagcgcatctacttctttggaatatctgagggcggatatggctcacagcgcttagcttcgtattatcccgattacctcgctgctgctggacctatggctggtggtgaacctcttatcaatgctccggtagagaacctccaacacgtagctttctcacttcgcacgggatacaatgatactcagttccaccgcagcgaattgacgggttacacgcgtgatgctcttcagcgcttagctgcacaatatcctggctactacaagcacttcatcgacatcatcccgaagtatggtcacgctataccttatcagtatacgacgccctacctctcgcagcacgtgcgtactcctcagcccaaccaagtgaactgggaagactatcccatcgatgggctctaccgtaagggatgctataatcttgcaccactcaagcgccccgaaggaaaagagcgcatttactatcaggagaatattatggggaataccgtagatctgaagatcaacacggtgaagtacgtagagaagctggtcagtgattactacaagcagtacttccatctcgtcctcctctatgataaggtctacgagccagctaagggtgggaagctccgcatctacctaagccccgagctgcttgatcttagcaagcctgtccgagtcttagtcaatgggcagcaggtctattcggggatggtgaaggctgactggtcacatctcgtggagagctgctcacgcttctttgatcccgagcgtctcttccctgcagctatcgacatagcttactaaggcgcacgctgtagcgcgctacgtatatatacagtgatcccccttggcttatctgcggatggccaagggggatcagtttatttctccagctcaatataggcggagaagtgggcttcactacttgtcagtaggagtggtataatgctttggctcggctgctggcgtggtcctcgctcaagacggaagacacctttgcgaccatctggcacgtattgctcgtaggcgaagtgcgcgagtacgcccatagttgttcggaggttgatctccacacaaggatgaaggcgcagactctccccatcgcggtagaagaagaggtcgatgccgatatagcctgtgtactgagagtcggagagctcttcctcgagccacgtgcactgggcattgatgagggcgagcagagcttcttcactcatgagcgaagtaagtcgctcccagaggtcttctggcgatgtgagtatgttgccaagataggcacgtcccgaagggagtgtatcgaaatgggatagggcaaagaagcttacctcgccgctttcacttcgtgtgtactcaagcgcccaattatctacgacctcgaggtaaggttcgatgctgacgcttccacttcgcgtacagctcccgataagcgcttccaggtgcttctcttgcaggggaagggggagtggaaatactccacggcccgaggaactataaggacgcttgatgaggactcgagtaggatcgcccaagggacgggatttgatgccttcgatagcggtacgcagtcgtagctcggtatctgatttgtctactcccgcttcgatccaacgggggaggaggtcactgggatagccgagctgatccgtcagatatgccagcaggtcatagctggcgcgtcggtgacttagccgtagatagctcggtgtgatgggcggaaagagtagggtagtagagaggaagagtgggcattctctcagctctctcacgatatggtcatccagtccccagaggacgacactcagctcagcggggagatcgcatccagccggtaggtcatcgccctcagcattcagcaggcgcgctggtatcccattgggcgaagcaggtgcatagatgaggtcttctccagaagctaagaggcgcaagagcggtgagagctcgtagcgcatccatcggatttccttggagagtgtgtagcgcttctcccgagagaagcttagggcttcttcgtgaccagggttaaagacccacagacgtggggtagatgcggtaggataagcgttcatatcaggagcaaagatatgcaaagtgctccgtcttcctgcgcttacatccctcagaggttataggtgagcgaggagaagaatgtgcgacctggtgagaggctccccgtgatattgacctgcgtcgggtggtagtcgaagagattatctgctccgacagtgatcgtgagtcgatgcttatagcgtgccgagacactcatgcgggagaggagatagccttcgtgctcgaagtaggaatacttacccgtcgtctcgtccagctcgctgagcgtcacacttcctgctccacgcagggcgtaggtcgcagtgagatcgcagtcgctccccgtcttggtctcgtaggaaagagctgcagtgtagttgtgcggacgaagaggagcgaagggctgaccattggcacggctctcggctctggagaagtcgtagatatagctgtagtcaccattgaacgtcagtccaagaggaaggcgcacgcgcaggcttgtctgcaggttcagtagtcggctacgttcgctcacattcgtataatgataggtgttcgtactcttggtcatcagcgtgcctatctggttggagatgacattgtacgaagcgatacccgtcaggctcaagtgcgaggtctgccactcaggggagaaacttagcatccgacttacctcgggacgcaggtgatctgagcccttgatgaagaacataccgaagtgatcccagtccatgaactgctccttgatcgatggtgcacggaagccttctgcgtaggaagtgcggagccttacacgccccaactgatagagtaccgaagcgcgtggcgagaagtgtgcgccgaagctggagtgtctatcgaggcgaaatcccgtgacaaacgagagcttcggcaccagatgccattcggcctgcccgtagagtgtgccggcagtagcttggtgccgtgtggcggctgtagtgaatcgctcgctgcggagacgctcgtggtagagctcgatacctgcattgacgaggacgggtgtcttctcttcggcgccgaagttgtactgcaggcgcacggtattgcccgtgaagtggaagataggtgttcgctccttgcttacggagaggaaattatcgcgattgtagagctcgtgattgtagtcgaggcgcaagttgtgcagctcgccaaatgcctgataaacctgcccacccagcgaatgactgaggtacttattacgtctaagtccgtcgccatcttggtcacgatagccatagcgaatatagcccgtcagctcgcgtcgtaagtctgaggtgcggtagcgtagacgctgagagagattgaggctcttgctgcccatgacgggagtggtctcaggccgggtgccttgtgtggctacgctgtaggccgcttggtcgatgtagctgatggaggtcatcgagctgaaggcgccacgtacgatttgtcccgacgcgctgtatctcgtgacgccctcgctactgtggtcgaaggtcgccgagagctcctctttgtgccgagcacggcgcgtgatgaagttgatgacgccacctatagcgttcgacccgtacagagccgaagctgcgccactaatcagctcgatacgctcgacattggccatatcgatgcggttaagatccaccactccgttgccctccgaggtcagtcgctcgccgtcgacaaggaagaggacgtgatctcctgagaagccttggaccgagacacgatactgagcgccgtgtgccgtgacattgatcccgggcaaactcatttgcagggcgtcggcagcagagcgtggtgcgaggcgatccagctcagtacgtgagatgatacgggtgatgatggggagcttcttcagtgtgcggggcgtctgagtacctgtgacgacgacgtcttcgacccgatgatcttgggcgagactatcgctcacgctttgggcaaagccttgagtgaagctacccgctaacagtgaagggaggaggaagatataggtgtgcttacagcgcatacgtggatctataactgaatgggctacaaagatagaccgattgcgaaggcctatccatcccccgaagtagtgatatttcccgccatctatacccgaaagtaattaggaaataaggggcttcgggtaggcttctctttccctttcgtagcgcggtatctggaggggctggcaaatgtaatataacattcggtcaaatgttatattactttcagtcgaatgttatattactttcggtcagaagttatattacttttagctgaatgttatattacttctctccgaaagttcctctacttcctttcggaaatacctctactttcgatcaaaaatacctctacttttcagaggaagtagaggaatatccgagaggaggtgcaattacctcctgaaagtgagcgaattacatcccgtacgaagtgcagtgatttcccgtgcaaagtggaggtacttccggagccgcctcaaggcaattgcactgggaagctccttggctttggtgcgcctaaaccttcactctcgggtcgttgttttagagatacatccatcgccccaagttaggtacgcgcgaggcggactcatggggccttcccaacacaaagcaaatgaataagaaatcagatattggcctcatcggccttgcagtcatgggcgagaacctcgccctcaacatggagcgcaatggctctcaagtctccgtctacaaccgtgcagaaggcgccgaagccaccgtcgtggagcgcttccttcaaggtcgtggcgcagggaagaacttccttggattcaccgaaatcaagcccttcgtcgagagcatagagcgtccacgtaagattatgatgatgatcagagccggcaagcccgtcgactacgtcatcgagtcactcctgccacatctcgagccaggtgatatcgtcatcgacggcggaaactcgaattgggaggactctgagcgtcgagaagctgagctacgtaatcacgggatctacttcgtcggctgtggtatctcgggcggtgaagagggtgctctaaacggtcctgccatcatgcctggcggcgctgaagaagcttggcccagcattgagccgatcttctcccgcattgcagctaaggctgaggacgggactccttgctgtgcctgggtaggtaagggtggtgccggtcactttgtcaagatggtgcacaacggtatcgagtatggcgacatgcagctcatagctgatgcctacgcttatctccgccacatcggcggcaagaccaacgatgagatgagcgaaatcttcgctcgctggaacgaagggaagctccgtagctacctcgtagagatcacagccgagatccttcgtcatcgtgatgccgagggcgaataccttatcgacaagatcctcgatgctgcagggcagaaggggactggcaagtggtcggtcatcaactccctcgagtacggccagcctcttgggctcatcgcgacggcggtctatgagagaagcctctcctccacagtagacctgcgccacgaagctgctgcactctacaccccctcgcaagcaacaagccgccccgccttcggtgacagcgacgtcgatgctcttgagcaaagcctctacgcatcgaagatcgtctcctacgcacaaggcttctcgctcctctccgaagcatcaaaggcacgcggatgggagctgaatctggcatccatcgcacgtatttggcgcaacggctgtatcatccgttcggccttcctcaacgatattgcctcggcataccaagctgatcccagcctgcagaacctgctcttagctccgtacttccagcaggagatcacggctgctcgcccttcttggcgtgagaccatcgctaaggcgctactctcggactgcccagtcccagccttctcctcagctcttagctacttcacatcactgacgacgcgtcgccttcctgcttcacttgtgcaggcacagcgagactatttcggtgcacacacctttgagcgcaccgaccgtccacgtggagagttcttccacgaaaattggacgggccacggaagtgatacctcttcgaccacgtataatgtatagtccccccgagaatatgccacagaccatgcagcatcatctgcccgagagcctcatccttgtgatattcggcgggtcaggtgacttgacaaagcgtaagctcatcccttcgctctatcagcttttcaagcaagataagctccccattcgcttcagtgtccttggacttgggcgtacggaatactcggatgtagcttatcgcgagcacctcgacgaagctcttcagcgctacctcagcgatggagagtacgacgcttctcttgccgagcagttcctctcaggagtgtattacctcccgatggaccctgcttctgccgaggactatcctaagctccgtgagcaactgaagacacttgacgagcgaatcaataatcctggacactacatctattatctctctacgccgccttctctctatggcgtgatcccacagcacttggcttctgtcgggctcaacgaagagggcgaagaggatactaatggtgagccctcggcgatccgacgtatcgtcatcgagaagcccttcggctatgacctccagtcagcaagagagctgaatgagatctaccgcaagtccttccacgaacatcagctctatcgtatcgatcacttcctcggaaaggagacggtgcaggatatcatggcgctgcgttttgctaatggtatcttcgagcctctctggaatcgcaactacatcgagcgtgtggagatcacagcggtagagaatatgggcattgagagtcgaggtggattctacgaccagactggtgctttgcgcgacatggtgcagaatcatctggcgcagctcgtagctcttaccgctatggaaccgcctgtgcagttcaacgctgatctatttcgtaacgaggtcgtgaaggtatatcagtccttccgtccaatgactcccgaggagattcgtcgccgtgtcgtccgcggacaatatacagagagcgagtggaagggagagcatcagcgtgcctatcgtgaggaagataagatcgcttctgatagccgaacggagaccttcgtcgccatgaagctctacatcgacaattggcgctggcagggagtacctttttatatccgcacaggtaagatgatgccgaccaaggtcaccgagatcgtcgtgcactttaagcctacacctcaccgcgtatttgctacggctgacggtagcaccgtacctaatcagctggtgattcgcattcagccgaacgaagggatctccttgaagttcgcagcgaaagtcccaggctctggcttcgaagtcaagaaggtctccatggactttacctatgaccagcagatgggtggcttagcttcgggcgatgcttactcacgtttgctcgaggactgtatgctgggtgacccgactttattcacacgcagcgacgctgtagagatgagttggcgcttctttgatccgatccttgatctctggaaggaggaagacttcccgctttatggttatcctgctggcacatggggaccaaagcagagtgacttaatcatcgagcgcgagcacagctggacgaatccctgccgcaatcttactcactcggagctctactgcgaactatgatctaccatcattatccttcccccgaggccgtcgcacgagccgtagctgagacggccttcgtgaagccttcgcaggctggctgggtacatatcgcactctctggaggctctacgccccgcttactctttgagttgctcgccgaagagcctctacgtagtgccgtagattggtcacacgtccatctctattgggtagatgagcgctgcgtaccacctacagatcccgagagcaactatggtatgaccgaggcggctctccttcgatatgtacccattccacaggatcaggtacatcgtatcgcaggagagaagctccctgagcgcgaagcaaaggattactgctggcttgtgggctcggagcttccatttgatggtgctttccctgtctttgatattgtgctcttaggcttgggagaagacggccatacgtcctctatcttcccacatcagatggagctcctcacggaggaagcaccttatgctgtcgggataagcccaaagggacagccacgcatcgcaatgactggaccgacgattcttgctgcaaagcgcatcctcttccatacgactggcgagaagaaagctcctatcctacggcatatagtagagcaagctcccgaggcagaaacttatcctgctgcttatatcttccgccagcgagccgacgtcgagctctatactgacgtagttcttcctattaagtagtagcgctccagccttactaaggccgacaagataaagtaaatcgccccgtctgtagcatcatacttgctacggacggggcgattgctttgaagcattctcaaggagctaatccatacgcatactctctgcgggatggattctgcttactaagctcgcaggaactaataccatgaggagaatcacgatgagtgtcccgacattgatagcgatccagagtggaaggtcaaagtggatgggcacggagtcggtgaagtagttcgctgggttaagcttgatgatcttgaactgacgctgtgcgagactcagcacgagagcaattgcattcccccagaagatcccacgtaggatgaggcgagctgctatctgaaggaaagtctgtctgagctgtctattcgttgctccaagggcctttaggataccgatctgtttactcttatcgagcacgatgatgatgagtccagtgatcattgcaaagcctcctacgagtaccatcagtgagaggagcgcatagacattcgtgtcgaggaaggcaagccaattgaagagctcgggctgtagctcctgaccgaggttgagaccatagttctcttcgccgataagatctggacgtgcctgaagagtggagatgagatgctccagcgtcggataggctgcgtcgggatcctgaagcatgatgatcagtcggctgtaggtattctcatcccagtgattgagacgctgcagggatgaaattgggcagagtgcgggggaaagctctaagcccgtcgactcatatattgcctgaagctcaaagacgcgtacccgcatcttttctccgaagaagtagatacgcacggcatcacctaccttgtagttcatgcgccgtgccacatgtgagggcaggacgatgggtgggcgactgtattcgctctcagagaaagagggaagtgtccccgactttacttgctcggtgaagtagcgactacggaaggtagagtcaatcccatataggagaatgccagagaagtctccctctgtttttagaagccctgcctgctggatgagaggtgagacggaagagacccccttctcttctcttaggaaggagagaagctccggagatacatagactggagtcgtggaggtcttccagttgctcccatagccattgaggctgatatgccctgtctgactaaaggcgaactcatggatctgtcgatggaaacctaagatgatggtgaccgataggagcatcactgagaggctcagtgccactccaatcgtcgtcaaacgaagtagggcagagacacgtcgtgtccctgccttatcacctcgagagagcccttgagagaggaaggtagtagctgaagagaagagagccatctacttgtctgacgtcgttgattcgctatctatcgctccacgctttttgcggcggctttgcttagccttacgcttttcttcctggaggcgcatttgctcgatgtactcctcatcttggaggacgtagcgcatgtacagcgagtagatgaacatagtaatgggcagtgcaatgagcatcccgaagaaacccaggaggtagccccagatagacaggaccaagagaatgagtgaggggcgcatacccatcgtctgtcccatgatgtgcgggacgatgatcatatcctggataatctgtacgatcatcaggaccccataggcaaggagcatacagacgaaggcattctcacccgtctgtgcagccatcagcaggctggccaacccgagtgggatgatacccagtgcctgcatataggggatgaagttgaggatcccaataaagatccccatagctgtagctaagggaagaccaatgatattgaaccctatcgagaggagaatacctacgcttatggcgatgagagcctgaccacggaagtagttattcatgtagcgatccagatccatgctgatcgtacggatcgtagggcggagtgtcttagggaagaggctgatgaagccacgagcaagattctcgaagtccagtaggatgaatacgaagtagataaagccgatgaggaagacaagcccccaagagaatatggagagggtgctattgataatcccaccgacctgatcgaggaggagcttaacgttctccaagaccttctcaaaagacaggtgctgtgggaagtttccccagcggagtcccccattgaggtagttgcggatattgcgtggtaggatcatcgtcaggatatcctgtccactgctatagccggagatcacttggagggtcttctctatctcagcattgattgatggtatgataaagattaccgcaaggtaaacgactgcacccaagaggagcaatgtcaggatgactgacagccctcttgagcgcaggcgtagtgtatactggaagaatcgtaccagcggcatcatcacataggcgaagataccagccagtaggaagggtaggataatgctccagatcgcttgcaccgccacatagatcaagagtataaggacagagagcacgagcatccgtgctatgcggtcaaaggtgaactctctacggaagaaatgtgacataggtgatgggagcgatatgctggagagatatactgaaaagggataagatgactaatgcttgatggggatctttgctacacgtgcttcatgacgaccaccctcaaagggggtatcaaggaaagctgcgaggatagccttgacctgctcttcgctgacgaagcgtgcagggatagagaggacgttcgcatcgttatgctcacgagcgagctttgccaactcgacatcccagcagagggcagcacgtaccttagagtacttgttcatgaccattgagatcccattgcctgatccgcaaacggatatgccacgggcaagttctccagattcaatagcctgacccatggggtgggcatagtcaggatagtcgcagcgctcgggtgaaggacaaccaaagtccttcacctcgaggccacgtgcgatgagtaatgacttgaccagctccttgacctcatagcctgcgtggtcggagcagataccgatcttattcattgtcgttgtactgtagtcgttgggtagtgattacttgctaagcagtgccttgacctccttgtagacatggtctggagtaaagccgagcttttcgtccagcaccttgtagggagccgagaatccgaaggagctgagtccccagatggcaccattgtcaccgacgagcccctgaagagttacggggagacctgcggtgagaccgaagcgacgaataccgcgaggaaggacttcatcctgatactcttggctctggcgacggaagagaccttcgctgggtacagctacgatctgcagacgaataccatccttgcgaaggagggcggcaccctcgacgagcgtagacacctcactaccgtttgcgatgagtacgacctcagggttctcgtcacgaagtacgatgtagccaccgcgtgtagctgcttcggcagcctccttacggctcttcccttcgggagcgggcagatcattgatattctggcgagagaggatgagtgctgtgggagtgtgcgtgttctccatagccatacgccatgcgatggtcgtttcctcgacatcgctggggcggagtacacgtacgctgtcagcgccatggtggttctggagcttctccatcaggcggatctgtgcttcctgttctacaggctcgtgcgtaggaccatcttcaccgacacggaaggcatcatgcgaccagacgaacttcacggggagctccatgagggctgccatacggatagcgggcttcatgtagtcagagaagacaaagaaggtaccgcaggccgcgatgacaccaccatgaagagccataccgatacagaggcaagccatagtgagctcagctacacctggctgtaagaaagccccaccgaagtcacctcgtgccagtgcacgggtcttcttgaggaagccatcggtcttatcggagttcgacaggtctgctgaagctacgatcatattctctatctgctcagccagtgcgctgaggacggtggcagaggcggcacgcgtagcctgattaggcttctgttcgatgctcttccaatttacagcaggggcttcgccagcaaaccagcgatcgagcttgcttgctcgatctgggttctcctcacgccaagtcttctcttcctgcttgcgagccttagccagctcacgaagctcctgaagacgtgctgcgtagagctcctgtacgtcggggaagatctggaagggagcttcgggatcaccaccgaggttcttgatcgtggcttcgatagaggctcccgcagccgagaggggctgaccgtgtgtattgacacggttttcatagttctccccattaggacctacagcaccacgacccataatggtcttgccgatgatgagggtaggctgacctaccgtagccttagcttctcgaagagccttacggatcgcttcgggacagcaaccatcgatctcgataacgtgccagccccaagccttgtacttagcagctacatcttcgctgtcgacctcctcgacggtggtagagagctggatattattggcgtcatagtacatgatgaggttgtcaagcccaaggtgcccagcgatacgaccagccccctgagagatctcttcctgtatccccccgtcggagatataggcgtagatcgtctgactcatgacccagccaagacggtgagcgaggaacttagctgcgatggctgcccctacggcgaaggtgtgaccttggccgagagggcccgaggtattctctacaccacgcaggacatcgacctcagggtgcccaggcgtagggctaccccattggcggaactgctgcagctcctccatcgaatagcgaccgaggagggccagctgggcgtagagcatgggggacatatgcccagggtccatgaagaaacggtcacggccagaccacgtaggtgcatcgggatcgaagataaggaactccgagaagaggacgttgacgaagtctgcgccgcccatggctccacctgggtgaccgctcttagctcgctcgaccatgctggctgccaagatgcggatgttgtcagcagcacgggtcattagttggttgttgttcattgaggatgatgtgatttgtagcttacagcttagttatatgttgtgtagatgtatctgcttttagacagctcaaagatacaacaaattaaggggtagatagcagtgtcaagcgcctaattttagacttgtacactctactcatcgggccagttcctcaggtcggagtatagacgcattgttagtgctctgatagtgtggactaaagaggggataatgtatgatcttccggaccttcctaaagtgaccagtactggtcaccgagcgaaccagtactggtgacattatgcaaccagtactggtcaagagtcgaagtagtactggtcggatgagtgaccagtactggtagtattttatgccctcattggtgtacgcaaaagcttctataggagaggatcttatctctgttgattcagatatatggaatgggagaggtatcctattagagatggtgacacaaaagttccctctctttcgtacaaagtataaagccccacttagtacgagacttagtggggctactatgtggaaggtgaggcttcactttagttgaagaagttggcaaccattggctccgtgaggcgcgtgatgattggcttgccagagggcgtgaagtagggatcactactctggaagaggtcacggatcagctgctcgagcccttcgtcatcctgcggtaggggacgttggagtgcttcagattcagccgcagcttcagctaagaacgtctgcacgtagtcagccccttcacgatgcgtatctaagctatcagctacgatcagacggacgaagcctgtggcatcgcgtgagatgaaggagggggcttctactatggagaagtgtccatcgcctaagtctccgaagtcaaagcctgcatgacgtagctcttccatcagagtgagtgccgtcgggagctcctgaggtgcaaactccaacacctcggggaagaggggctgctcgacatggtagctgtgcgcacggaggtctgctcgatactgctcgaaagtgacacgaagtagagcacgtgtcaggtcaatgaaagcgagtgcatcgcccagcgtcgtgatgacatagcgactttgataaagcagtagtgacgagggtagtgtggggcgcgtacgtagtgatcctgcctgtgagagccgtataccatggctctgaggctcctcgggctcttcctcaaagagaggtgtctgcatcgtcgagggcgtcatgctgtcgaagtgctctccgaggtcatcccaactaatctcgggctccttggggagctcacccgtacgagtggtaccgaggcgtatccctccaagccgtgtcccggccgagggtagggaggctccatcttcagcttgaaggactgcttctgctcccagtgccgtatcaaggtcaggaagcacatccttgcggccagagtaggcgggtatctcgataggcgaggcgttctcaaagtcaatgataggtgtcagagcgtgcgagctgaaggcatcacggatgaggctctgcaggacttggaagatcgttgactcatcgaggaagcgaacatccgtcttctgtggatggatgttaacgtctatattctcggctgggatggtgaagtaaaggaagtactgtggctgattgcctgcagggatgaagttctcgtaagccagactgatcgccttatggaagtaaggatggcgaatgaagcggtcgttgacgaagagatactgctgcgctccctgcttgagagaagtcgtgggggtgccgatgaagccacgtattgtgcagaaggcactctcgtagctcacaggaatgagggcacgagaaagctttgctcccccgatgtcgatgatgcgctccttgagagaacttgctgggagtatcttatcgtacttccctgcaccacgcagcatgaatgagatctgcggattagctaaggcgaccttagcgaactcgcgccagatctccatgagctcagtggactccttgcgggcctcgaggtgcttgcgacgaccaggggtgttgtagaatatattcatcgccttgaggctcgtccctggggagcaagctactggcatctgcgagcgcacctttgccccttcgatgatgagctcagtgcctacctcttggtcagccgtacgtgtgcgcagctctacttgacatacagcagcaatagcagcgagggcctcgccacgaaatcccatcgtagagaggcgctgtaggtcatcaatcgtctgaagctttgaggtggcatgacgctcaaaagccatacgcgcatcagtgggcgacatccccttgccatcatctgtgacggagatggactggcgccctgcaccgacgacctcaatctgtatctgcttggctccagcatcgatcgagttctcgacgagttccttgacgagataggctggtgcaggtacgacctcaccagcggctatctgattcgcaatggactcggggagtaggcgaatgatatcgctcatcgcaggaagaagaaccagaagactaagcccaagaccatgagggccagcatgagcttgatgatacgctggtctctatcggaagacgtgataccacgcttatgctgtcggctcagatggcgagccgagtgaatgaaggcaccacggatctgctcgctactgtcatagctcgaactactaccagccccctcatccttcgtcaaggcttcgggaagctctgcatcgggatcgagttcaccggcctcgatcatctcctgacggatacgtgcgacgcgcttagctagttcttcctttcggggatcccagtagatgagcttgtgctcgaattgtcgaggtcttctttgcttgaaaaaggtctgtatacccatgagtagtctaaatacgattgaggtgtggaggtagccccactatcactgctggggcgaaggacgcactggtatacctggcgatactcctcggggcgaagagcacgatactgggtcagcagtgagtcggtgcgaagcgcttcttcgcgagctacccgctcgaatggctcataagcagccagtgcagccttggctccgctgaagcgcttaaggtctgagaggggacgtgagtgctgctctctgggagggagggagtctccgacagtcgtgatatcctccttgcgcatggggcgacgatctgcagcccactggaagagggggagtcgattgacctcgggaccggaggccatctccagaggataagccttgccctcgacggggcctcgccaaatggacttcttgaccttgcctgagtccaggaggacgtgcatcgtagagctcgtcatgcggttgagtccattgtagtcattggtaccctcctccttcatgtagtagatcgattcaaccttaccgctaaccaagatctcacgcaccgtactatcctggacgtaggcacgtaagctgtctccactcatctggttgtagtagtcgacgctgtcaatatgctcgacgaccagagccttaccgaggacgtctacgtagtcaagcttcttacctcggaagtagaagtgagtagtatcacctgagagctggcgctcctcactccaaaggatcggtttcccatagagcgatagggtagagtccatggagacgtagctaagcgagtctgctacagcctgagcatctcggcggaagactcgcacgtttcgataaccacgtaggtaacgctgcatcgtatcgggcttagccttaccttcttgagctgctacggcacgaaggctatcgaggcggaggcggtcagggatagggaggctgatgagctctaatgtatcagctgatacatagagcgtatccttctgcgagtactcttcggcgtgggcacgcgaagtcgcgaaagcatagtggcgcttgtcatcgaagtacccgtagtccccgtagagaatagccttctgtgcggtgtcggagagctccatgcgcccaaaggcttcaccgaacttactcatgccatcgtaatagatggagtctccgatgagagtcttggcgcccgaggttacttcggagcgatcaaggagaatccccacatctcgaccgacatcatagatgccacgctgcgagatgatctgcccagagtcagactggatgagtgtctgcccctcgtagctactgatacgcgtatgggtattgtagaagagatgctccgtcgtcatcgtcgtcttgtcattgacgagcttgacattgtagcggaactcagcatcattcgtagctgggatgaactgcccatagtctgaggtcagcgtattctgcgcatcagtgatcgtaccgccctcgaaatagtaggctatatccgcgatacggtcatagtccaagctatcggtatagaggtcagtcgtcttattcgccaggtgcacattatggcggagacgcgcgagcttcgagacgccatcatagtacagatagcgcgaatacatatgtacggtgtctccctgtaccatgtgtacctcaccaaaggcctcgaagatctggtcatcctcattgagataggcgctatcacaagtcatggtcgcattgccatgacgcaggacgacaccacccttaaggcgctgcaccccgggctgcagagccgcatcgtacgtcagcagatcagcatgctcaaggataatcctcgtaccggcctttgctggacgaggtgactgcatcgtcggtgacgttcctcggtaggaggcacgagaagtcaggtagctcccacccatcacaatgagggcaagagctacacatagccttagacgttgattcttctcctgaggcatttacttcttgtcctcgtggatccagtctggatattggaagtggcagttgcgatagcgctcgttgatctcgatgtgggtctgcttctgacgagcacggatccattcgtcgatgactcgggcacgcttcttccccagtgccatctccttgatacgacggaagtcgctgttcatattggcgatatgctctgggtgaatctccttgatgcgtatgatcgctacctgctccagtcccttatcggtgtgcatgacgaagggcttagagatttcccctggcttgagctcataggcgatcttcgcaatatcctgtgggaggtcctcatagcggaagttgggagatccagagaactcgctctcgttagaggtattggtcatcagaccaccattgttgagcgtattcttatcatccgaatagagctgagcggctacatcgaaggtgatcttctcatctcggatggctgtagcgatggagtcgatgcgagctgtggctgccttgatggcactctcctcgaccgttggacgcaggaggatgtggcggaagttcaccagctcaccgcgcttctcgatcagctgagcgatgtgatagccttcgtccgtcttgatgataggtgagacacgagtcttatccatcaggttgaagacagcggtagcaaaggcagggtcaaggtaagcacgtccgacgaagccatattcaccacctcgtgaagccgtacgcttgtcctcagagtacagacgtgcgatcgtagagaactcacgcttacctgagttcacgtcttcggcatatccacgtaggattcccttgactcggtccagctcggagagggggacttggggctccagagcgatgatctgcagctcgacagtcttggggatgaagggaaggctatccttaggtagttgcttgtagaaggtgctgatctcggaaggcgtgacctgcacgccctgagagatcttagacttcatcatctctacgatagcttcattgcgagcctgtactgtacgctcctcgcggatctgagaaagcttcttattgaagtactcctcaagcttttccttagagcccagctcagagatcacgttctgtacccacatgtcgaccatacgagtgacctgcgtgtcgttagcctggatactatcgatcttcgcttggttgaggaagagcttctgtacagctatctgctcagggatgatgcagtcagggtctccctcgaaggtgagtccctgactccgtgcaaagagcttctgatactcaatatccgagaggaggatcggttcgtcaccaaccatccatacgacctcatccacgatggtcttcttctgaggttcgtctcgcttggtctgtgcaagactcagagagccgagagccatgaggctcaggagcactatggttgtctttcttttcatcaagggaaaggatctgtttaatacgtaggtgaaggcttagttggcaagctctgagaggaacttgatgcgaactaagcgaacttcatcttcggagtaatcgctaccgagctcggtgagcgcttcattgatatcatcagtcgtcgactccttgaagtattcgtagatatcttcaatgcgatcttcgtcgatgacctcttcgatgaagtagttaatattaatacgggtacccgagtagacgatagcttcgacctcgctgatgaggacgtcgaagtcaagaccaagagcaatcgcgatatcgtctagagccaccttgcggtcgatctgctggatgatattgatcttgagcttggacttatcggggcgagtacgtacacggatgtcagcggggcgctcaatgtcattctcctcgacatgacggcgaatgacctcaaggaacttctgtccatagcgcgctgccttacccgctccaacaccagggatgttttgaagttcatccatggtgatggggtagagggtagccatcgcctcgagagaggcatcctggaagatgacgtagggggggacattattctgctgacccatcttcttccgaaggtccttcatgatcgagaataggacggggtcagtagactcacctgagcctcctgatcctccacctgcgggctgatcttcgccctcctcatcggagtccgtgatcttgaagctcgttggcttcttgaggaacttcttccctgcgggagtgagcttcaagagtccatagttctccacgtccttcttcaggtagcctgcgatgagtgcctgacgaatgaccgtcgtccacgtggattcttcatgatcttgacctgatccgaagcactcgagttcctcatgatggaaggactcaatgtcggagttggtctccccgcggagtactgcgatgacatagtcagcattgaacttctccttgaggctgctgacgacctcgagaaggtttacaagcaattctttagcttccactttggttttaggtactaaacaattatcacagctaccgcagttctctgcctcatagcgctcgccgaagtagttgaggaggaaggaccgacgacagatgctggtctcagcatagtcggcagtctcgcggagaagagctcgggcgatctcctgatcagcgacggacttgcctttggtgaagcgctcaagcttctccagatcatcgtgatcataataggcgatacatacaccctcacctccatcacgtccggcgcgccctgtctcttggtagtatccctcgagactcttgggcatgtcgaagtgtatgacgtagcgtacgtctggcttatctatccccataccgaaagcgatcgtggctactatgacctctgctcgctcttcgataaaggcatcttgattctctgctcgctccttggcatccaatcctgcatgatagggaagtgccttgatcccattggcctgaaggacctcggtgagattcatcacctgggtacggcgcatgcaataaacgatcccgcttttcttcggattggacaatatgtagcgtactatatcccgctctgattccgccgtcttggggtggattcggtagagtaggttagggcgattgaaggagctttggaagaccgctgctgactccattcccaagttcttcatgatatcatgctgtaccttgggggtagctgtggccgtgagggccatgatagggcgttcagcgatctcggtgacgatagcacgtatccgacgatattcggggcggaagtcgtgcccccactcagatatacagtgggcttcgtctacggcgtagaatgagatcgggatctcttgtagaagcttgatgttctccttcttatgtagagactcgggagctacatagagcagcttggtccgcccctggcgcacatcctccttcacctcctccagtcgagtacgggagagggaagagttgaggaagtgagcgacggtatcctcttcacagaagcctcgcacggcatcgacctgattcttcatcaaggcgatcagtggggagataatcactgctgtcccaggcatgagaagggctgggagttgataacagagactcttcccgccacctgtgggcatcaggacaaaggtatcttgaccagcaagaatactctcgatgatctcctgctgattccccttaaactggtcgaagccgaagtgcttctttagtccttccttgaggttgatcccgtccatggccatacgcttcgtgattactcggagtctacttgagggtagagattaagctgcgactgcgatattctataacacggaatgatatatcttcttagtgtgctctcacgcttcgggggtcagtgtacctccttagtgggagagccatccttggcgagctgttgctcgacgaaggcagcatcgacgacgaactctgtcacaccctgtgaggggagctcatacatcggctcgaccattacctgctccatgatggcacgaagcccacgggcaccgagcttctgctccatggtctttgatacgaccaggtcaagagcttcgtcggtgaaggtaaggtggatcccatcaagctcaaagatcttggtgtactggcgtaccagcgcattcttcggctcggtgaggatcatacgtagtgtgtcgcgatgcagaggatgtagataggtgatgatcggtagtcgtccgatgatctcagggatgagaccgaagctcttgaggtcacgagcatctacatagcggaggagctcctcttcttcgcgcttagagagcttagcgccggggctgttatacccgacgacgcgtgtattgaggcgatgagcgatcttacgctcaataccgtcaaaggctcctgcacagatgaagagaatctgcttggtatctacctgaatcatcttctgatctggatgcttacgaccaccttgaggggggacgttcacgatagatccctcgagaagcttcagaagcccctgctggactccttcgccactgacatcacgagtgatagaaggattgtctcccttacgagcgatcttatcgatctcatcgatgaagacgatcccacgctcagcagccgcgacatcatagtcggcgacctggaggaggcgagtgagaaggctctcaatatcctcacctacgtaaccagcctgtgtcaataccgtagcatcaacgatagtgaaaggtacgtgaaggaggcgagcaatggtctttgccaaaagtgtcttacccgtccctgtggggccgagcatgaggatgttgctcttctcgatctctacgccatccgtctcggcacttggctgagcgaggcgcttgtagtggttgtatacggcgaccgagagatagcgcttggcctcatcttggccgacgacatagccgtcaaggaactcttttatctcacgtggtttggggagatccttgagctccttctgagcagcttcttcggaggcctttgcttcggcaccagagagctcttcgaggagctggtgtcctcggtagatgcactctggacagatgtgagagttgatcccctcaaggaggcctccagtctcttcttctgtcctaccgcagaagctgcattgtttctgttgcttctttgccatctacttctctgtgcgggtgagaacacggtcgaccatcccataagcctgagcttctgtggcggtcatccaatagtcgcgatcgctatcacgctgtatcgtttcgaagggctgtcccgagtgctcggagaggatggtgtagagttcctccttgaccttgaggatctcgcgagctgcgatctcaaggtcgctggcttgcccttgcatgcctccgaggggctgatggatcatcacgcgagagtggggaagggcaaagcgcttccccttggtccctgcgacgagtagcacagaggccattgaggcagccatacctgtgcaaatcgtagagacatcgcagccgatgtactgcatcgtgtcgtatatcccgtagcccgcatataccgagcctccgggggagttgatatagatggatatatccttgcctggctcgctgctatcgaggaagaggagctgggcttgtatgacattagccgtatagtcattgatctgtgtcccgaggaagatgatacggtccatcatcagtcgagagaagacatccatctgtgcgacgttcatagggcgttcctcaatgatcgtcggagagatgtagctactctgcacttgcatatagctatcaagtgcaagggaattcatccccaagtgacctacggcaaacttcttgaattcgttcatttctattctagtagtaatagggccttctatccatattacggctctatataacaaaggtataaataattctgaaatagcctaaggaaatataaagctctacttagcggtagaatatactgatcttgtagctgaaagtgcactctgctgatagctccaagaaagtcgatacctagtaggagactgccatcgctatatagcggatatcctgatacaagagggagcgatgtgcagactcacctcatcaggactcattccaatagtggttggtgctatgaaccactattggagactgttgccttagagcccttgctctctatttattgtgctaaggcatcgcatgtccagcccccccaatatacctcttcaaagtgatacacaagcccttcgccttatcgcgagtattcctcttatccagcagaggggaaagtgtcattcttgtgaagaaaaaagcaccttcccatagtggtttttccgcatctatgcacgtagtcttaaagaccaggtacgtaaatcttaatatccacgtacgtagatattagagccacgtacgtagcccaaacttatctgccacgcgtccacaacttttatccctacgcggagcaacaacctatattggtcgcggagcaaccccgtattggttcatatacgaaccactattggttgatacccctaacctatattggtcgtcatgctgaccaatatagattactacccctctcctctataagtctacttgtgacttgctgtaagtactcttatttcagtgaattattgtatggggagaacgagtgcggtttgttgtgacctgtacactcatagtccctctcaaaacggcacagtcctgagagcaaagactctcaggactgtgatataggtagctgaagaagcgggttcttctaagtgctatcgcttccagaagtgtggggtaaggatgcctatcacggtaaagacttcgagacgaccagccaacattaggaagcataataggcctttagaaaaagcccctgcacctgcgacgctgttagcatattcaccaatacctggaccagagttactcacagctgagcaagctatactgatgctggagacgaagccattattatcaagcatcagaagcatagatcccacaaagattaagcttacatagaggacacagaaggcgagaatctggtgtaccacactcacactgagctgacggccattcatcagtacgggggtgagtaggtgggggtgtatttgcttcttaaactcattgtataggttcttgatcagcaccaagaagcgcgaggccttcaatccgcctgatgtagatccggcacagccgttgacgaacatcaagagtagggcaatcatccagaagaagggcccccacagtgtgatctccgctgtggaatatcctgtacttgatcccaaggtaagcacctcaaagagcgcatgacggatattcccctccatggtaggatactctccttgtagactaatccaaatggtggtaatgactgtagcgccaagaatgaaaatcgtgaagaagcgcgtctcttcatccttgaataggcgcatcggcttgccggtcacggcgaagtagaccagtgtgagattgaggctaccgatatacatgaagagtgcgaggatatattccgtatagatggagtcaaaggctgctacactctcatctcgggtcgaatagccacctgtcgaaatgcaagtgagcgcatgacaaacagcatcaaagagattcatcggacccacccaaagtaggaggattagcacaacggtctctgccagatagatagcccaaagacgcttagcgacatccgagatacgtggtaggaagcggtcgtgtgtgatccctgtagtctcggcattgtaaatctgacttgccccaccgccgaagatgggtaagagtgctactgtgaagaccacaataccgacacctccctgccactgtgtgaggctacgccagaggaggactgagtgcggtaatccttccaccttcgcaaagatcgtggctcccgtagttgtaaagcccgagatcgtttcaaagaaggcgtccaaaggagaggtcaatgctcccgtcagcaagaagggaagcatcccaatagcagagaggagaagccacaccgatgtcacggcaagcataccttcacggcgtgaggctcgcttcttgtgtagcttatagccctggtgtaggaggagtgcaccgacgaagacgaatactccgatagtgatgatccatggggtgggagactcttgatagagcagtgctactatgaggacaatgagcatcatagccccttcgacgaagcacatcatcccgaggatacggctaatgaatcggaagtttatcgagtgcatgggttggtcgggtgggggctactaaaagagctccttgagcgtattgatcgtgaggtcgtgatagaagatcacgacatggtcatagggctcgaagacggtattcccatcaatcatacaggggcggccattgcgcatcatccccccgaaggtcatgtttgcggggagtttcaggtcactaatgcggcgccccacgatatgggagtcacgacgagtgacgagctcaataacttctgcattattgaccaaggagagacaggtcacttgtcccgtatcctgcccaaggagtgtacggtagatatagcctgcagcaaggagcttcttgttgatcagtgtaccgacatcgagacgataggcaagcgggatataatcaatattctcctccttagccaccgtcttatagacgttgtagcgcttcgccgcgagacaagccaagacgttcgtctcggagttctctgtcagcgcaatgaagacttgggatccttccagatttacttcatcgacaatctctgggtcgcgtccatcgccgtgatagatctcgacgttgtgaggaagctcctgcgagagacgtaggcacttatccttatcaatatcgatgagtgccacctgaatgtcttccgaaattttcgagatggtacgcagtgctacggggctagctcccatgatgactacacgctcgatcttcggcgctttcttacccgagagcttgcgaacgagatcaatatgatctacgtcacaggtgaagaagacgaggtcattgtgctcaatgcgggtattcccgcgtgggataagcgtatcaaaatcgcgcttaattgctacgacgtggaagtacttgccatcgtcgcctggcagaagcgtctttaagtctttcagatactgccctacgatgggggcaccattgcgaaccttcacaccgacgagcgccagtgcaccattgaagagcgtgacgtactgacgtgcccaggggtactcgatgatcgaaccaatctcgcgagcagcgagctcctcaggatagatcatagagtctacaccaagctcctccatgaggatgttgtattcactctcgaggtactctgggttgttgatgcgagcaatggtatgacgagctcctactcgcttagcaagcatacatgccatgacgttggtcgcttcgtcgggggtaaccccgacgaagaggtctgctccagctacatgagcacgctcgagatcagagagtagggtaggactcccctcgataggtaggacctccagatggtgactggctcgctcaagcttcttgccatcttgatccatcaagacgatgttctgctcctcgttggagagcatctttgccaagtgcgtgccgacttctccggctcctgcgatgactattctcatggtgtcgttatccttctatcgtagtgccaaggagtgcctttgcggcattataaatagagtcttcatctaagccacagtagcgcttctgctcggctggtgtaccatgagagatgaactcatcgggcaaaccaagcgtcttgatacgccccttgtagctagcttccatagctagctgcagtatagctgagccgacgccaccactgaggcaaccttcttctatgacaaggaggtcagggacggaagcaaagagcttacgcaggcactcttcgtcgagaggcttggcaaagaccaagtcaacatatgctacactgtgcccctctgcttgtaggcgctctacaactctcgctgctgagacaccgatgggtcccagtgataggacggccaatgatgagccttctcgtagtatgcgagcctttgcaaaaggatagtgctccataggctgcttccagtctacgacagagccggcaccacgaggatagcggatagcaataggccccgaccagtcgaagcaagccgaatacatcaggtgacggagctgtatctcatcatatggggagcagacagccatccctgggatcgtacgtaggtatgctatgtcgaatgccccctgatgcgtagcaccatcttccccaactaagccagcacgatctaagcagaagactacatggctctccgtcaaagcaacgtcatgaatgagctggtcataagctcgctgcatgaaggtcgagtagatgttgcacacggggatgaagccctctgcagccatacccgaggagaaggtcaccgcgtgctcctcggcaatccctacgtcaaaggagcgcttgggatacttctccatcatgtaggtcatagagcagcccgtaggcatagcaggtgttactgatacgatacgctcatccatatccgccagctcaactaaggtctcgccaaagacatcttggaactttggtggctgaggcgtcgctgaagtcgagctgatgcgttcgcccgtcttcgggtcaaacttccctggagcatgccagatcgtgggctccttctcagctggggcatagcccttacccttcatcgtgctgatatgcagtaggcgaggccccttcatatcgcggatatcctggaggatctgtacaagatggacgacatcgtgcccatccgttggccccaaatagcggatactgaagctatcgaagaagttcgtctgcccagagagtagcgccttgatgcggttgttgaagcgctgcagatccttatgctgatcctcatgaacgatattgagcttgcgcagcatacggtacatatcgtagcgcatgctattgtacgtggggttggtcagcaagttgaccatatgacgattgagcccaccgacatttttgtcgatagacatgttgttatcgttcagtatgatcagcaggttgttggggtaggaggaggcattgttcagcccttcgaatgccatgccgccactcatagcaccgtccccgatgaaggcgacgacacgccgattctcatccttgagagcagctgctacagccatgcccagtgctgccgatatggagttggacgcatgcccagcagcaaaggtgtcgtattcactctccgaggggatggggaagccagccagcccgccccaagtacgcagcgtgtggaagtcacgacgacgtcctgtgaggatcttgtgtacgtaggcttgatgcccgacgtcccagacgatgcggtcttcgggagtatcaaagacgtagtgcatcgccacggtgatctctacggcaccgaggttggcgccgagatgccctggtatcacggagagagtagagagcatgaagcgacggatctcctcacagagctctgggagctgatcggggcggagccgtcttaggtcatgcggagtctctatcccatccaggagggggtaggtctgctcttgagtggtgctatctggcatgatgatcgatgggttagtgctgagctgagaggtggctgatcagcgcatcgagcgtgagcttctcttgctgtccgctctgcatatcctttagggtaaaggtacttgtagcacgctcttcttcacccaccagtacgacgaaggggatcttgagactatcagcatagctcatctgcttcttcatcttcacgggctctggatagatctcagagcggatgccttctcggcgtaggcgtgctacgataggcatcaagtaggcagcatcctcttcgctgaagtttgcaaagaggacttgggtaccgatctcagcttcacttgggaagagtcccagctccaggaggacgtcatagatacggtcggcgccgaaggagatacccacgccactgaggccatcaagcccgaagataccggtgaggttatcatatcgcccaccacctgagatactgcccatggcagcatcaagggccttaacttcgaggatggctcctgtatagtaggataggccgcgagctaagctcaagtccaccacaagctcagccttgaggtcaagacgatcgatatggtcaaggatatactccagctcttcgatacccttctgcccctcttcggaggtggctaagagctccttaagctgcgtaagcttctcgctattgctcccagagagagccaggaaggggcggagcttggacaactcagcctccgtgaagcccttactacgcagctcatcaaagaccttttcttcgccgatcttctcaagcttatcgatagctgtcgtgatgtcaattagacgatcacctctgcccgtagcctctgcgatccccgcaaggatcttacgattattaagtaggatgcgtacacgcaagccaaagcgacggaagacctcgtcgatgatcttcaggagctcgacttcgttaatcagtgaggttgatccgatgacgtcagcatcacactgatagaactctctatagcgacccttctgcgggcgatcagcacgccataccggctgtatctggtagcgacggaaggggagtgtaagctcagagcggtgcatgacgacatagcgtgcgaagggtacggtaagatcatagcgaaggcccttctcgcaagccttattagcaaagtgaatagcattgcgctccaagagttcctcatcagagagatcacggagagcatcacccgaattgagcaccttgaagaggagacggtcaccctcttctccgtacttaccgaggagggtagagagctgctccatcgtaggagtctctatttggcggtagccgtagagtgcatacacttggcggatggtgtcaaagatataattgcgacgagccatctctacggggccaaagtctcgcatgcccttcggtatcgttggtttctgcatcttcttatgtagatagtctatgatatttctttactgtggcctcaccctctgcgctgtaggaggtgaagcgttgtgtcatattcatttttctcatcccgagggaaggtctcgcttgccgtctcggtccattctgaaggatcaagctcggggaagaagacctcggcatcagggaaagtagcttggacgcgagtcaggtagatccgatcggtatgaggtaggagctggcgatagatctctccgcctccgatgatgaagacctcttcatctgattcacaagccttcaatgccccctctatcgtagggtaaacctctagcccctcgcgagcggttagactgcgactgacaacgatattacgtcggttgggtaggggaccacgaggcagtgagtcgaaggtattgcgacccataagaattgtgtgcccagtcgtgagctctttgaagcgcttgaggtcagcaggtagatgccagagaaggtcattcccacggccgatagctccgtctaaagctatggcgacgacgatagagagtatcataccacgatgaattatactgagaccttacctgcgatgtggggataggggttgtagtcaaggagttcgaagtcctcgtagcggaagtcctccagtcgtgtgatctcaggattgagacgaagtcggggaagagggcgtggctcacgagtgagctgaagctccacctgctccatgtgatctcggtagatatggacgtcaccaaagctatggacgaaatcacccacctcaagccctgtgacctgagcgatcatatggaggaggagagcatacgaagcaatgttgaatgggaccccgaggaagacgtcagcactgcgctgatagagctggaggctcaggcgcccatcagccacatagaactgcatcaagcagtggcaaggcgccaacgccatatcatcaatctgtgccacattccacgctgagacgatcatccgacggcttgtcggatcacggcgtagctggtcgatgatctgctggatctggtcaatatgccctccttgatagtctggccaagagcgccactgatagccgtagatcggcccgagagagccatcttcacgtgcccactcattccatatacggacaccatgttcctgcaggtactgaacgttcgtatccccacgcaggaaccacaggagctcatatatgatactcttcagatgtagcttcttcgtcgtcaagagcgggaagccctgacttagatcaaagcgcatctgatagccgaaggtgctgagcgtccccgtaccggtacggtcacccttgagatgtccctcggagaggatatgacggagcagatcctgatattgcttcatattctataatgatataggtgcacaaagatacacaatagccctcagttagcctgctttcgagctgagggttacagagcttccacatcaaaatctccccccatctacaagtcgtattgaagcagagctgatttgcgaacgactattgctctgtaggttaacgactatttgctctctaccatttcgcacacgctcccctgctttgctatgcaatacttaggagaggaatgctaccgagatactatgctttgatgcggttgccccttgagagttaccgtagaggatagtaccactccaagtagatagccgagggaggtctctgcgaagcacctcatatctatacatcttctgccccatcaccactgagggtatatctatgccaaatcaaggagaatagaggggcatcccataccactctataataggagctttgcggtcgctgtttctgaccagtactgattgatgagggaaccagtactggtcactctatgcaagtagtactggtcacgatgcgaaccagtactggtcaactcaccgaccagtactggtagcttttaggtgcaatagcggagatgtgaaaattagccttgcaaatgcgtaacgagctctcttgcaaatattatacgtttctcaggtaatactttttgcctacctttgccgacaccccctcgatatcacacttggggggaatgcataaatactattgaaaatgaagaagattctgatgactgtagctctcgcagctaccgcgcttgtctcagcacaggctcagtcggagttcaagcccctcgcagggagcgtgacgaccgacttctctctctttgctaatgggattttcaaccagactgaatcacccgtagctctcggctcacacgctggtatcaatgctggtctcatcaagggccgctacttcctccaggacaacatcgccctgcgcctttctctgggtctgaacaacagctccagcacgcagaagacgactgaccccgtgaccgaagctaccacgaagagcaacgtcttcaccttcggtcttggtctcgaacaccacttcggtggcacggatcgcctctctccctatatcggtgctgagctcttcctcggttctgctacgggctctacgaagagcgttaacagcgcagcaactaccatctcaaagaatgctcctcgcttcgtcttcggtggtgacctcctcctcggtgcagactactacgtcgctcctcacgtctacctcggtgtagaagctggtctggaacttctccatgcttctaccggtaagacctctacgacggtaacgcctgcaggtggtacggctacgacgaacgaatctaagtcaacgtcttctgctggaggcttcgctaccgatgtcaaggctggcttcaaggtaggtttcgtcttctaagcgaactcccatacaagctcttagagtaactcttaagagcaaaagaaaatccccctaaggtctcaccgaccttagggggatgtctatttagcgctcttctttagagggggagcgttttagagcgaagccaagctgcttcgtcgctgcttagtaggggagcgattgtctgatagacacgttcctgataagcatcgtaccaagcgatttcctctgcggtgaggagatccttacggacaagctgattatcaagatagcacagagtcaccgtctcgaagccgaagaagcgaccaaactcagtctcttcacgtagctcggtgatgacgagattctcgatacggatgccatacttacccgagcggtagagccctggctcgttgctggtgatcataccaagctcgagaggcgtggggttgacttccatgcggatgttctgaggcccttcgtggacgttgaggaagaagcctacaccgtgtcccgtaccgtgcccatagttaaggccctgctgccagagtgcatggcgagcgaggatatcaagctggctaccacgcgttccttcgaggtactgcaccagggcaagctgaatgtggcccttcaagacgagcgtgtagtccgtacggagttcttccgaaggagcgctgagcgctaccgtgcgcgtgatatccgtagtcccatcgacatactggccaccactatcaagaaggagtacaccctctggacgtaccgtagcagccgtatctttctgagcgctgtagtggacgatagccccgttaccgaggtagccacagatcgtgccgaagctgtcaccgtagaacttatcatccttagcacggaactcattgaggcggatacccagctcgtactctgtgtaagtttcaccacgtcccagagcttcctctagccacttgaagaagcgggtcagagaagcgccatcacgtgccatgaccttacggaggcaagcgatctcagtcccgttcttgatagccttgagctgagtcagagctgagactccctcgatcttacggcagtgtgctgggattagagaatagatgtggtaggtgatacgcttggtatcgaccaagaggcggacttctgcagggagtgctgcgatgaagccatccaactccgtgtagcccttaagggttacaccattgcccatgaggtaagagcgaacttcctctggtaccttagcggggtctacgaagatgactgcttccttctcgccaatgtagccgaagcctacggctacgggattgaaggaaacatcattgcctcgtacattgaagacccacgccagttcatcgatcatcgtgatgatcgtagcattggcaccctgggcacggagcttgccacggactgcctcgatgcgttccttagcactagctcctgagtattcctcggggtgaaggaagagtggctgatcggggagagcaggacgatctgcccaaatacgctcgatgagatcctgcgtgagacgatactcgataccatagacagcaagcttacgctcagtgtcatcagcctctgcaaaggagaggcatgcgccatcagcaccgacgactgcaccagctggaagctcagtggcgaggaagccttctatagtgggaacgccagggacgcccatcttgaaaagctcgatagaagagtccttcagctgctcgcctgcctgcaggaagtagcgggagtcagtccatagaccggccttatctaaggtcacaacgacagtaccagctgagccattgaagccgctgatccacgcacgactcttgaagcgatcaggcgtgtattcgctgaggtgtgcgtctgaagaagggatgatgtaggccgagagacctgctgccttcatctccttgcggagtagcgctaagcgctcgatgattgtagacatacgcttataggtttatgtgagaaacagggtagggttaggcgggattctgatgctccgtacggaggaggtcattgacttccttcacgggattgaaggtatcgagaggcacttcaacaaaggcggtgttccagtcatgcatggctccattccatagtccagggagctcaagagccaggagctcacgaccgctaaggctcttatgcgagatgaaggcggtcttgggattgacaaacttcgtcaagtcaaagggctggcccttatagtcacgtatagagcagacaaggtctactgggttgaagtatcctccagcttcaaagaaggcgcgttgtccagcatcctccatatcgatctgcgagctctcaaggatctgcagagaactgctaccgtcatgctcacggacgatgaaggggccaccaccaggctcaccttggttgcgcaccataccgcagacgcgtatggggcgattgagacgaccttggatccatttgatggtactactatcctccttatccaaatcttcaggtaccgtgatggatagttgcccctcaaggaagccgaggatttcctcgatctgtacgtgtgagggcttgcccttttccaagagggtgaggtagctgaagatctgccgtctcagtgcgatgagtacgcctccgaggaacttcttatacatgatcgttgtgcccttatagggatcgggaaccacgttgtcaatgttcttgatgaagaccacatcggtagggagcttcccaaggttatggatcaaggcaccatgcccacctgggcggaagagtaggtggcctgtatccgtacggaagagctcgccatcaggtgtcaatgccaacgtgtctgtagaagggagctgttcgctgaagctgatgtcatagcgcacaccgtagagatcctcatagacaggctggagcgagtgaacaagagcttcaaagtctttgcgatgctcgggtgatacggtgaaatgcagtcgtaccataccctcacgatcacgggcatagagcgctccttcgacgagatgctcctctgccgaagtacgtggggcttccttatagttatggaagagaagtagcgccttaggcttgctaccataacccagtcccttagggagtaggagattttctacgatcgtcttatactctccagctgcgatgagcttagggatgctcttccagttattacggagacaagcttcgttgaggcgctcatagaaagcaaactgattgatgtggctaaagaagcgctcttcctcaggcttctcaggagctgtataaggagcttcaagaaagttgtagagcatcttgaacatgcgtgaagctgctccagatgcaggcaccatcttatagaccgaagccttgcctgagagaagatactcttcccagagatccatatagccagcttcttcactggtctctacacgcaggataccctgctcaagggaagctgatgccaagatctccaaataaggaaatcccttgcggatctcctctacttggtgagctgccgcctcaggagtaatgccacgagctgagagttcttcgaggtcttgtggggtgaatagtccgttgtccataggtagtagtatgtgtagtgtgttagttacttcgtctttgtatagcccagagaagggaggatcgtgaggagcttctggcgctgatctccctgtatgatgatctcaccgtccttggcagatccaccgacaccacagcgctgacgtagcgttttacccaaggcctcaagatcagctgagctaccgataaagcccgtaatgagcgtcacctccttacctccacgctgcttctttgagagcgagagacgaaggcgctgctcagcggctggtagcgtctctggttcagccacctcggctgttgtgtattcaaagtctgggttggtactgtagagtacccccaagcgattcttccagtccgacatagttgctataccatgggtgagatatcaagtgagaagcctacgggcaggaaggctgacacatcccctccatagtgtaggagctcgcgtacaacagttgagctgatgtgtgtgaagcgctgggaggctgggagaagtaccgtctccatatcggcaatgtgacgattgaggtctgccagcgtacgctcgtactccatatctgtactactacggacacctctaagtagggctccgacctgaagctcctgagccagagatacggttagtcctgtgtaagtcaagacgcgcacacgaggctcatctgcatagtaacgagagatctgcagcaggcgctcctctgcagagaagaggttgcgcttcgcatcgttagtcccgatccccacgatgacttcatcaaagagacataggccacgtgccacgatgtcggcgtgaccacgagtaaagggatcaaaggatcctgcgtagagggcagtgcgtttcatgtgcgtcatcggggagatctatcgctgtgtcaaatcaatgatttcctcaggagcaggtgtgaggttctctatacccgtctctgtaacaagataggtattctctatgccaacagctccaatatgggggaggacaaacttgggctcaaaggcgatgaccataccaggttgtaagcgatccttactgcgccccatcagtacggggagctcattgatctgtaggcccaagccatgaccaacgaactgcgcttgtagctccgtccccataaagtagggggtagcaccagcttcctctaccatgcacagactctcattgtagagatctgcacacgacgtcccaggggctgccttctgcatcacctgacgatgaatttcaaggctgagttcgtgcaggcgataggcctcatctgataggcggccaatagaataggtacgcgtcatatcggtgcagtagaccccgtagtttccagccatgtcgaccatcacggcttgcccctcgcgaaggggagtcccattagaccctaaggggagtgcctgactacctgctccaccaagagcaaagtcatagggggaaggagcgcctgcattgtcgccagtaaggaggctccccatatagatctccatcgctgagccgaagcagcggaagataccaatagatcctctacgacgcatctcccgctcaatctcgatctgtagatctcggtcggtcatcccatctcggtagagagaagggatcgtagcgtaggtagcgatatgatgacgcgctccctcacggatctgctccagctcaagtggcgtctttaccatgcgtgcctcacgtaggagagctgtcgcattgtgtagctcagcctcggggaagatcttgcgctgtcgctggatatcagagtagctctgctcatcgagttctaaagccaccgaacgtagggcagcggtatcgatgtactctgtgatctgctcgatcttacgcacatagtgtaccgtagcactctcgggatgaagctgtggacggcggataaagaactgaggctctccctctcgagggatgaaggcaagaccagagaacacctctccacaaacgtagaggaggttgacattagagaccacaacgagagcctcaataccctgacgctgaagaagcgactggagcttagctacacgaagacgatagtctggctggagaaattccattgtatatcggaggatagagaactaattaaaatggggtttcattagaggggaggggtccgctcattggatcaaagcctgcatcaaatcctgggtctgagggggcaagaggatcagctaaagcatcagctccacgagcacctctaccgaggcgtccaccacgagcatgcttctcatcagcacccagctgggagagttctcccttgggagcaaagcgagcatagtcagctttgaaggccaggcgcacgtccccgacaggaccattacggtgcttagctatgatgaactctccgacacctcgcaggtcttctccggtctcaggatcactgtagatcttgtagtactcagggcgatggatgaagcatacgatgtcggcatcctgctcgatagcacctgactcacgaaggtctgagagctgtggacgcttgctattggcatcacctccctgcagacgattctctacgccacggttgagctgcgaaagggcgatgatggggatgtttagctccttggccagcatcttcagcgaacgtgagatggtactgacctcctgctcacggttgccgaagctcataccgctggcattcatcagctggaggtagtcgatgatgatgatcttgacctgatgctcacggacaagacggcgcgccttggtgcgtagctcaaagaccgagagagatggggtatcattgatgtagagtggggcgccctcaagcgtaccgatacggttgttcagacgtgtccactcctcttcattgaggcgaccactcttgatcttctgcccgtcgatctcacagacgttggagaggaaacgcttgacgagctggacggcactcatttcaaggttgaagagtgctacggggatcttattgtcgactgccatatacttcgccatagatacgacgaaggccgtcttacccatagcaggacgggcggcgatgatgataaggtcagagttctgccagccggaggtcatctggtcgatgtcaccgaagcccgtcgtcagcccactaatcccttcctctcggtttgccgctatctgcatttcattgatagcacctttgacgaggggattaataggaacgaagtcgcgagtcgaattctgctgagcgatctcgaagagcgagccttccgcctgctggatctgctcctgcacatcgacgacatcctcataggcacctttaagcgtagaggttgccataccgatgagtcgacggctaagagccttgttgtagagcacctcagcgtgggcttccaggctacctgtagacatcaccttggttgtcagacctgcgatgtaggctgcatcaccgatctcctcgaggacacccatacgacgtagttcctcggttacggtgagcatatcgatgggctgctgagccatagccagcgtcaccatcgcagtatagatcagctcgtgagccttgacgtagaaggtctcagggcggagcttctcactgacacgcgcataggcatccttctcaaggaggatcgccccgaggacagcctcttcgaagtctggagcctgaggagggatgcgtccgtccagctccatcggtacgacagggctgggcttcttgctgctacgcttctttgccgtttctgtggccatggttgtctgtgattagcttagtcaagcttgaggactgcgaggaaggccttctgaggcacctcgaccgtaccgatctgcttcatgcgcttcttaccctccttctgcttctctaggagcttacgcttacgagagacgtcaccaccatagcacttagcagtcacgtccttacgcacagccttgatggtctcacgagcgatgaccttagcgccgatagcagcctggatagcgatgtcgaactgctgacgtgggatgagctccttgagcttctcacacatgcggcgtccgaaagctacgctgttatcgacgtgagtcagtgtcgagagagcgtccacagggtctccattgagtaggatatcaagcttggcgagcttcgagggacggaagtcgctgatgtggtagtcgaaggaagcatagcccttcgatacgctcttcagcttgtcatagaagtcgatgacgatctcacccaagggcaggtcaaagaagatctcgatacggtcgcccgagatgtactcctgcttgatgagctgtccacgcttaccgaggcagagcgtcatgataggcccgatgtaggcggtatttgtgatgaccgaagcacggatatagggctcctcgatgtggtcgatcgtcgtgatgtcgggaagccccgatgggttatgtacctccttgcagacgcccttcttgtcgtagaccttgtaggatacgttggggacggtcgtgatgacgttcatgccgaactcacggtcgagtcgctcctgaatgatctccatgtgcaggagcccaaggaagccacaacggaagccgaagccaagagcgatggagctctcgggctggaaggtcagcgaagcatcattcagctggagcttctccagcgaagcacggaggttctcaaagtcttcgctctcgatagggtagagccccgcgaagaccatgggcttcacttcctcgaagccagcgatagcttccgaagcaccgccatcgacatgcgtgatggtatccccgaccttaacctcgcggctcgtcttgatacccgagatgatatagccgacgtcccccgtagagacctccttgcgtggctccatgtcgaggcgcagtacgccgacttcatcagcgtcatactccttgcccgtagcgatgaacttcacgtggtcacccttacggatcttaccattcaccaccttgaagtaagcgatgataccgcggaaggggttaaagacagagtcgaagatcaagcactgcagaggtccttcgggatcgcccttaggagtagggatgcgctcgacgattgcacggaggatgtcatcgacacccaagcccgtcttaccgctggcacgaatgatctcctcacgcttgcagccaaggagctcaatgatctgatcctcgacctcttcgggcatagcgcttggcaggtcgaccttattgatgataggtatgatctcgaggtcatgctcgagagccatatagagattagaaatcgtctgtgcctgaataccctgagctgcgtcgacgataagcagtgcgccttcgcatgcagcgatggagcgggagacttcgtaggagaagtccacgtgtcctggggtatcaatcagattgagtacgtagtcctcaccatcaagcttgtagttcatctggatggcgtggctcttaatggtgatcccgcgctcgcgctcgagatccatattatctagtacctgctcctgaagatccttcccagagacggtctgtgtcgtctccagcaggcggtcagccagggtactcttcccatgatcgatatgggctataatgcaaaagttacgtatatgcttcatcttgattacaaagatactactaagacggggaaatagccctatacttaggcacatccacagcgcttccacggcaaaatccccaagtgacctcctacagggctcctgagaactcttaccgaaaggggaacttttccacaaatcgcagctcacagcacaaggctcagaggtgctaactctcacatgccaaggcacagctgaagcgtccatctggcagatagatgctggccctatctcagctcttataagacagttccgtgaagcttagaagggaagcataaagccgtatcgcaggagaaagatatacgttgggtgagcacgcgaaatacgttgtgcgaacaagacgtatacgtttcgagcttaaaacgagactgttgcatagagtcttactctctttagagtggtaaggcatcgcacgaccagttccccgacatacttctccgaagtgaccgagcaagcccttcgccttatcgcacgtattcctcttatccagcggagggaagagtgccattctcgtgaagaagaaagtgccttcacgtagtgggttttctctatctacgcacatagtcttaaagaccaggcacgtaaatctaaatatccacgtacgtagcccaaacttatctgccactcgtccacaacttttatccctgcgtggagcaacaacctaatataggtcacgtcacaaagctatatagcttcgcgccgaaagctatataggaatcagtccaaagctatatagcattcttcgccatcctatatagctctacacacgtacccatatacctatagagaatattgcgcaagaccaactcttcattactcgtaccttctccctcgaaaatcggagcctttaggctgagacgttcgaaggcgaaaagtgcaagctgtgaagaaatggccttgcgtaatggtctcaaaatgtataggtttcgggcaagaaacatatacgtattgtggcaagaccgaatacctgccatttaagccagcattcggtcttgccacaaaaaggggaagggtagggggccgaactattccatttctacgaccgtgatccctgcgcctccgaagcgaacatcctcatcacggaagtgctggacacctcgtactccgctcagatacgtgcggatagactcacgaagagcacccgtacccgtcccgtgtaggatgcgtacactgctcacaccgagctggagtgcttcgtcgacgaagtaagccacggcatcgactgcctcattggcacggaaacctctgacgtcgatctcttggcggaaggtgaggcgcttctgatggatctggtcaatgatccccgaggagcgaacggcctgagtaggcgaaatcttcttgcgatggcgctccgcttcggcaggggagacggcatgaaggcgcttaacgggaatggtggtcttcagctctccaagagccaccgttgcctcacatcccgagagggagatgatcgtaccaagagctttctgtccctcgatacgcacgacactgccttcggtgagtggtgctgtgggtaggggagtggcggaagaaggagcttcctcagagggctgatggagtttaggtaggggttccttccccttggccttgcggtcggcatggcgctgacggcgtgcaagtagacgctctacctcacgctgcgtcttcttagcccgtgccagagcctcggcttcctcttctgccgagaggccttctttatagtcagcaaggcgctgacggatgatacgcgtctcatccttagcagcttcggcctcacggatctcacggatcgtgcgctcgatctgtccgcccgcctcttggataaggcgctgggcttccttcttcgcttcggcgatgatgcgcttacgctcctcggcgatgcgcgtcatctcctcggtgtacttgctcgaagcctcttggaggagcttctcttcctggcggatgctctggcgcttgctctcccagtagcgcttgtcacgtatgacgtcttgcaggtacttgtccatgtcgatgtagtctgcaccgaccgtctcgcggacttcgctgatgacctcctctggcagaccgatcttgcgggcgatctcaatggcgaaggagctaccagggcgaccaatagagagacggaagagcgggcgcatctcgtgacggtcataaagcatcgccccattgataaggccagcatgctcctcggcgtaagtcttgaggttctgatagtgcgtggtgatgacaccgaaggcaccagcatcattgaagcgatgcaggagagcttgtgcaatagccccaccgatcgtaggctccgtgcctccaccaaattcgtcgatgagtagcaggcttcgtgctccgccctcacggacgaagtgcttcatgttgcgcaggtgcgagctgtaggtactcaagtcatcttctatggactgctcatccccgatgtctatgtagagacggtcaaagataccgaccgaagagtgatcagccatagggacaggtacgccgcattgtacgaggtactgcagaagaccgaccgtcttgaggcaaacggacttccccccagcattaggccctgatatcaggaggatacgagcttcgggtgctaccagtcggatatccaagggcacgacattgcgtccttgagcacgtagcgaacttaggagaagcgggtgctttgctccccaccattcgacgatagggctgtctgagatacgaggacagataccgcctatatcagctgcccagcgagccttagcacggacaaagtcatagtgcgcgaggaggctataggcggtgaggaggtgagggatgttgggacgaagacggctggccacttcggtgaggatgcggataacctcacggcgctcctcactctccagctcacggatatgattgttggcttcgaccaactcaacaggctcgacatagactgtcttccccgtcgctgactcgtcgtgaatgataccacggagcttacgcttgtgcatagggctcatagggatgaccaagcgaccatcacgcagggcgggctgtacatcttgctccacccagccctcacggcgtgccgtcgagaggatgcgctgtagcatacccgagaggctacgctccgtctcacgaatagtctgacggatgcgcagaagatcacgcgaagcattgtcacgaagctttccctcctcagtaagcagggagcgaaggtgagtctcaatcttagggaaggaaggcgtatcctcaagtagagaggcaaggcggggataggtataggcgaaggtctccgccgcacgctcgcccgtcgtatgctcctcgaggaagaagcgctggaggctatgtagcgtctccagcatatgcagtaggtcaaggagttcctcctcttcgatgaacgtaccctgaggacggatgcgacgcagtacgtcacggcagtccacaagtgccaaggagggtagaggggattgacctgccatgatggtgatcatctcacgagtctcatccagcgcccttactatatcttctttatctgcagaggcttcaagtgcctgcatctcttctcttcccagagaggatgcacagtattcctccagcaggtgtctgacctcactatagccgatcttctcagagaagttatgtgggtagacgtctaatctatttatctccatatagtgtcccaaagatagggggcaggtcggcagtgcgatctacccccatagttggttgtattgctctattatttagttagcggcgcttggtcttcttcttacgtacggaccagccgaagtggcctatatattcgcccaagccaaagtactcgccgtgggcatagaccaagagacctgcgcgcttcatatcaaaggctcccgtctcaggatcaatgtactgctcgttagctcgtaccccgacgatatcggcgaggaagagatcatgacttccgagagaggtaatctcacgcacacggcactccaggctaatgggcgactcttcgataagtggtactcccagcacagtgcctgcttccttcgtgaagccacaggcagcgaacttatcttcgcgccttcccgatacgacaccacaccagtccgtctctcgggccatcgacacagtagaaaggttgataccaaaggcaccttgctccttgatgatgctgtgtgagtgacgctctgggcgtatcccgacgacacacatcgggggattggtacatgccgtactcacccatgaggcggtcaggagattagctccgccatcctccatcgtgccacagctgatgaggacagcgggtaggggatagataagtgttccgggcttccagtctactctcatagtagctcgacctcctcagcacgcgtctttcgtccacagtagtgacactctaagaggcacttctgatctgagtcctcctcggtagacacatggaatcgcgtctgcatgggctcagcgttggtgatgcacttggggttggggcagcgcactaaacccttgacttcgctgggaagagctacctgtcgcttctccgtgacctggtagtcacggatgacattgagatgaacctctggcgcgagtagggcgatcttgtcgatctcttgggaggagacgaagtggtcagccatcttgatgatccccttacgcttgtgacgagcactcatgaggttgttaccaatcgtcacaggagtcgtcagcgtgtcaagacggagaagtgccacgatcttgaagagtttctctgcgggtatatggtctaagacaatcccatcacggatcgcctcgacgagcatcttgtctttgttcatagcttatctaataggaggcgtgggaaggttagtcattgacctcaaggccgaggacctcgcagaggatggactgacggacatatagcccgccttgagcttgctctacataataggcatagggcgtatcgtccacatcttgagcgatctcgccaacacgaggtaggggatgaaggatacgcaggtgttctcgacaaccctccagcatcgaagcggtgaggacataaacgttcttcacacgctcatattcctcaaggtcgatgaagcgctctcgctgtacgcgtgtcatatagaggacgtcaacacttcggataatctccggtgtgaagtccgtcgtctctgtaaatggaatacctgcacggcgacagaagtccttgcactcctcgggcatcataagctcagggggagagacaaagatgaagcgaggacggaagggagccatacccacaatcagcgaatgcacggtacggccatacttcaggtcaccaaccaatgcaatggtcttatcgtagagagtgccctgcgtcttgcgtatcgcatagaggtccagcagggtctgcgagggatgctggttggcaccatctcccgcattgacgatgggggcacgcccgagctcagaggcatagagtgcagctccctcaaggtagtgacgcatcactatggcatcagcatagttgccgaccatagagatggtatccttgagggattcgcccttagccgagctggaagtcgctgcatcagagaagccgatgacacgacctccaaggcgatttacagcggtctcaaagcttaatctggtacgggtagagggctcaaaaaagagggttgcaatgacgcgcccctcgagaagcttgcgattgggattctgctcaaagagagctgctcgatcaaggagccgaaggatatcctctgtagagagttggttgatcgatactaagtgcttcataactctgtcgtatagtccatggtgctaatcatgatatgtcttagcaccatacaaagatactcagattatgaagaagcctgctcatgctatgcttggaagagagtagagacctcctttatggagctttcctcacaaaacaacctcccgtcctaaataaactaaacataacacgtggactggtggtcgcgaggggattctacggagtagcttgaactttggctcgggcttagccgatatactataccttatatatagagggaaatccctctaagttggccgtatcctaaaatagagcttatgacttcttggggatctgcaaggcaccgataagatcctgaatatccgtgaagccatgacggcgcatgtaatcctcgatgccatcgacaatctgggtggtcacggaaggatccacgaagttgtacgtaccgacttcaacagctgaggcccctgcgagcaggaattcaatcgcatccgtagccgaggcaatgccccccataccgataatgggaaccttcaccgcctgagccgtctgccagaccatgcgaagagccatgggcttcaccgctgggccagagagtccacccgtaatagtcgaaagtactggacgacgcttctctgcgtcgatggccatccccaggagcgtgttgatcattgagatcgagtcagccccttcggcttcgactgctcgtgcgatctccgtgatgtcggtgacattgggagatagcttcacgataagcgtcttgtcataaaccgcacgcaccgcacgaacgacagaggctgcgccggcacacgtcacaccaaaggccatccccccctccttcacattggggcatgatatattgagctcaatagctgggatcctctccagggcgttgatcttctcagcagtctcgatatagtcctcgacctgcgagccactgacattgacgatcatcgctgtgtcatagccagatatcgtgggatagatatgctcgcagaagtagtctacccccttattctgaagtccgacggcattgagcatccccgaaggagtctctgccatgcggggataagggtttccctgacgaggatgtagcgtcgttcccttgacgagtaccccaccaagacggttgaggtcgatgaagtcaccatattcgagcccataaccaaaggtcccagaggcggtcatcacggggttcttaatcgtgagcccacggccgatatgtacttgagtcttgagcataattagcctttcttgacgagcttagaattaaagacgggaccttcggtgcacacacaagtattccccctcccttcgagatcttctacacagcataggcaagctccgataccgcatgccatactattctccagcgagacttcgcagtcaataccgcatgcctcagcctcctttgccacggcgatcatcatgaccttagggccacaagtaaagacgcggtcgaacgagccttcatgaaggatcggatgatccgtcacgcgaccctcgactcccagctcgccgttgtctgtcgtatagtagacgtcgccaagagctgcaaactcctcacggagcacaatgtgtcccgcggtacgtccgccaagaagaatcgtaggacggacacctcgctcagcgaaggtacgagccaagaagagcataggagctataccgacacctccaccgaccagcagtggatgctcaatgccctctacgctaaaggtattacccagcggaataagcagatccagctctgtgccgtctgcaagccctgtaaggattgatgtcccttgaccaacacgcccgataagtagccaaagctcgcggcgctcagggtacacattacatatagatataggacgacgcagaaggacgaagcctccagggaccgcaacttggacgaactgcccagcagccatagcggggaaggtgcctgcggcctcgggaagttgcagcttcagcaggtagttacccgcacccagagcctgagtggagagaagcgtaaaccgaagagaatactttttcatagagtgagataccgtgacttagagacacaaagatacgcagaatcctgcgccctaaagctactcctctgtgtctttgaaggtcgcaaaactattatcgtcatagaagaccgtgatatgggcaattcccttctctctacgctctcgcacctctgcctttaggcgtgctatttcctcagcttgagcctgaagtatcgcgcgaagggtctctttttcctcccccttcactcctgtagaagcgaagaggtccgctcccgaatcacttgacacaccagacaccccaaagacaaactcctcgggactcataatgtcggagaagtgctcgacgatcttgtttattgtcgccacattgatctgttgcttctcattgagattgagggatagcgtcgcaggagcaattccagccttcatcgcaaagtctcttgaagtaagcccgctcctatcgacgacctctttaaggcgttttgttatggctgataggtctatatactctgacataatggctgcttgaactattgttttaaatcacaaaacaaagatagagaattaaattcaatcgcacgaatagtatgtgttttaaatctaaaacccacacgcgaatctgactccgttcccacaaagccatggccatcctgcacccaaaatggctataagctttgctttacataataataataagttcctctttttcacatatatacccactacaaaacgaagcatatggagacaaaatacgggctaccccctctataccgacacctataacttcacatatcagtatataaccatttgattattaatacacagacgcacgtagcagaaagacttgcaggagtccgctttgctttcgtgaaatattaatttgaatattcgtagcactcccctacctgccccatgaattcacattcacaaatcaaaactcaagaagagattcaatgtagagacttctccctacgaggtaaattcatacgagcaaacatagtgacatattgacatcactaaaattcgtacgtagaggcatgatcaaggggatggtaaaggcagggtatcatgggaaggaagatcgcggcttagagggcttttatggaattggcggttcatatccaaagaaactttgctgaggtaaagcatccaaatagagactgctccctatagtcctgtcctctattagggtgctaaggcatcgcacacccagctcacaccgatatgcctctccgaagagatacgcaagcccttcgccttatcgtgagtattcctcttatccagcggagggaaaagtgtccttctcatgaagaaaaagcgccttcacggagtggtttttctctatctatgcacgtagtcttaaagaccaggcacgcaaatccaaatatctacgtacgtagatattagagctacgtatgtagcccaaacttatctgccactcctccacaacttttatccctacgcggagcaacaacctaatagaggtcacttcacagagctatatagcttcgcaccgaaagctatacaggaatcagcccaaagctatatagctttcttcgtcatcccatatagctctatctatgccccatacacctattatggaaccattgcacaagcccacctcttcattactcgtacctccttccctcgaaaatcggagtctttaggctgagaagttcgaaggggaaatacgtgaaaaagcagtattcacatcgccatagatttggctttttaacacgaaatcattcaaagtgcaggatatttggtaaagatgatttaactttagcgacagatagagtatccctcgacagagggctctgctcatatttgatgtttcacctatatatattgtatagcgtatgaagaagatcattgcattgctcagcgcagcatcacttctcaccctcagctcgtgtgacctggctatgctgggtgaaggaactatgggacgtcgtgatacgcagcgcatcgagcgtggtatgagccaagagcaagtatattcgctcatgggacgacccacctaccgccgatttggagacaatggtatcgaagaatgggaatatcataagtcaggcctcttcgaaaagcggatcactgtcatcagcttttcctctgggcgcgtcgtacgtatgaatacgtacaatggagactacaatgactccgatcgtggacgctatccgaaccaaagagggaactatccctacggcaatggtgattatggaggctacggtggcaatggcggctatggtggatacggagactatgatgactatggggactaccgcagtgaccgacagaatgatcagtggttcagtcaggtctatcgcgaggtccaacgcaagacattcacggatgacaagatccgctatatccgtgatgtagcccgtagaaaccgattcacgacgcagcagacgatcaagctactccgtctcttcagcttcgatgaagagaaactcaaggtcttggcttgtgtagcctctggactacgtgacccgcggaactcctatcgtatcgttgatcagttctccttctccagttctcagcaggaggcgcgtcgcctcttaggtatcatttgatgagcctatcttgagagcttcgcctcttttatccacgaggagcctcctcttcaagggctacccccatagaggaggctcctctcatatataccgacacatccacacatcatacactatgaagaccattacaagcctcgccgctactgtcggcatcgtcatcaccatcagctcttgtggcctcggaaaaatacgccaaggagtcaataagatcgagcgtgggatgactaaggagcaagtgacctcactcttaggtgcccctcttaatcgcagtattcaggccgatcaatctgagctttgggaatacagcttctctgacttcccgggcaatacaatcacggcacatgtgacctttgtcaatgatcgcgtgagtcagtttgacagcaaggagaatgctcctttccctgcgaagactaccccttatccagagacagcacctgtcatcattgcgtctcctcatcctcagccaacctatccgtatcccagcgataggcagtaccccgacccagggtactatcctggacgaggctatagcgacccctacggagaagatgctcgtgcctttgagctattctatcacgatgtacaagagctgatcttcacgggcgatcagattcgtttcatcgaagaggtcgcccgacgaagctacttcactacagagcaagctgcgcgccttatcaatctatactctgacacagagcagcgactcaatgtcctacgcaccttggctccccgcttacgagacgtgtacaattcaccctatctacttgacctcttccgctacagagatcgcgagcgcgctgagcgtatcctccggcaattcggaccggctattccccgccagtatgacccacgctatggggggcaggtacctcgagaagaggacttcgaagagttcctacgagggatcaatcgcatatcatttccgaaggatcagattcgctacgtacaagatgctgcccgcttcaatacctttacggtacgccagacagagcgtattctgaagcagtttaactgggacgaagagcgcctacaggtcctcgaggccatagctccacacctacgtgacgggtacaatgcttaccgactcatcgaatgctttgatttcctggatgcgcaggagaaggcacgacgccttctcggtctctcacagagaggacgctaccgaggctacctcagctcgtctcacagtacaagcaatgaagattatggtgcaggtatccttgagcacatgcagcagaatcaggatgctatcatggatcagatgacgtggtatcaacctctactcacaaagctgagcttgactcacgagcagggagagcgaatccaagtccttcgctcggagcttacgggtcacaagatcagtatagagcaaggcgtcgagcttctctctcgctacttctctggggatgaactacgacttcaagccttggagcttatcgctccccaactcaatgagagcaaagcctcccgagcccgcttcttggatctcttcacttacgcagaggctaagtcacgtgccagctatcttctaaggctataaaggagctaccctatttcctaaagaaaagaagcctgcccaacgatagaattcgtgaggcaggcttctttatttcaaaaccatctaacgtagagaagatgcagcttatccttcaagcgacttctgataagctatacgcgggctaccgtcagctatatataccgttccacaagggacgaagccctctgccacgagaagctgacgcataggagcattgtcttcatgggtatcaactctgatctcagagcagtgcttagaagcaaatgcaaggcattcacgaaagagacctcgcacacgtccatcggaggccaagcgatggatgatgccataaggcttatcattgatccaccgtccctcaatatgctgataggttggctcctcttcgacagcaaagtaaaaggtaccgacaagccccgcatactcgggagccacacagacatagctatggccacgagcgatatctgagcttagctgctcagccgatggatagccctcaggccactgcgagggattgccgtgctcagccatgaaggctcgcgccgctgagataagacgcaggatctcgggcagatcctcgggagtactctgacgtatcaccatagtatagcgataaaaagacctcagggctaccccacagcgaagtcgggtagccctgaggctgatattatagtgcgatttcgttcccttagaaggagcctacgatgaggatcgtcaccaggagggcaaggatcgcgtaaagctcagggaagacggccatgaccatcgtagcgctgaagacgttctcaccattcccgatagcctggatcccgttagcacagacctgagcctggcggatcgcggagtaagcacctacgataccgaggatgatcccagcagcgaggatagcccaagcggcatagatcgatacagggccagcagcgacgagcttgtcgagagcagccttagtcataaagaagccgacgaagccgtacagcccctgagagctagggagtgcggagagcccgatatactgcccgagggcatctgggttcttcttcatcgcgccgacagcagcgttaccgcagatcgtcacaccgatgctactaccgatacccgtcagaccaaccatcagcacaatgccgaggaaagataacatctcattcataatcgttacttgtgtttaagagaatatttagtttgtttttacttacgtgtgaaaggggtgtagggcttaccgccaccttcgaactcactgttcttgtagtactctacgaaggtgagacgtagtgggtgtacaaacgcaccgatcatagcgataccgaagttgatcccatgcccgaagagtaggacgagaagtgccataacccagccgatgatgtagctgaatacacttgcaccgctccccgcctcagggacgcatgacatggcgagctgattgaagacactcccgaggataccacccgtcagaccgatagcgaagagacggatgtatgagagcgagtccccgagaagccctgaggctgtctcataggtgctccaaagccctgaaccgaagttgatgaaggggttcttcccagggctattgtagaagaaggcaacgagcaccgagaggccagctataccatagagaatataggtcacaggctgtggaagtgtgatcgatgcctttggcaaggcgtagatcaagcctacagctacgagcaggagtacccaagcatagccagccaaggagtgacgccagcccttctgaagacctttcttataggccccaatagtcttaccaaggaggatctgtaccaagccgatgatgacagagatcatcatcatattatcctggttgaagatgtactccttgttgtgagcccagggcagctcgataccgaagatcccccccataagcataccgacaacgaaggcaccaccacccagccattggccaaggcccaagaggcttgtgtctccacctttgctacgcaggcggaagtaggtacatacggcgaagagtagaagaccatacccagcatccccgaagcacatgccaaagaagagcatgaagaagggggcgatgagatatgtctggtcaatctcttggtagttgggcagagagaagaggcctgtgatgaactcgaagcaacgtgcgaatgcattattcttcagctggatgggcacacgctccgtctcgggatcaaagtcgacttgacggaaatagtagccagcttcttccagtgcagcttcaaaggctggagcatcgtccgtaggtacaaagccctccagcagaaggagcttctcatcagcaaggcgctccccttggagtcgcgtacggccgaaggtaaagcggttctccagtaggagatcatagctggcgagctgatcctgccaaagcttagtctgctcggtgagcttctccagctgctgagctcgtgcagcctcagcttcagctacaagtccctcgagttctgcaatgctacgtttgggagtggcaacatgctctgcctctggtagagtctgtgaagctccagcagcatgtagttgaacgaaatagactcgacctgagagcgtggcaacgggcacgacatcatactccgcttcgaatgcctcggtaaagcgcgcttgaggaatcgtgaagaagctaagagcgtagccagcttctgatagctgactaaccgcagctggatcaaaagccccccaaggacggacttcggttgcttcgagacgaagagctgccagctcctcatcttggactgacaagcgcctcagttctccctcgatctcagatatcagagcttcaccctccgcctcatttttgataggctgggaaagctcagctgctccgtctgtgatatagggacgcagggcgcgcaaggtatccttgatatgggtacgctcggagagaatgccacgcaactcctcgacctcacgactatccttctgttcattgacatgtaggacacccaggctgcgtagcttgtgaaggaagccttcatagtccgaatgaaagaccaggaaggcatatttattcattgacctaatcattgtgcagcctcctcttcttctatctgtttacgcagctcaatgttagtgcgcataatcttctgcgaggccttcgataagctctcctcatcttcgaggaagcgcttgatcttacggatcgcatcctgataaccagggatctgaaccttctcgaagagatttaccttctgcgtggtcttctttcgagcatgctcgaggtactccatcttcaggcggagaaactctgcctcgataccagtagttgcaagagtcttgaggagctcaataccctctgcccaccaacttggtgcattgaagatactgaaggggcgtacctcatagtgaataccatcaagcactgggagtagaacccctgcaatcttcttcatcgacagatccacgcgatcgacagtgatgagcgaagcatcaaattcgtcccacaggctgaccattccctggtatccccgcagttcttgctcgagcttctcctcgaggagatccacctcacgcttggtctgcttgacctgctgacgtagggcgctctccttactcttgatagtgggtaaggtacgcaggcgcatcttcagcgccttctcctgttgttgtagtgaggtcttattgtattggaatcgtatcgccataagacgtttaatgtctaactattattccttagttatgatggagagctctcggccccggacaattatcgcctgatggttcgtgatcggcacgagagagagccggcctccatacgtagcgagtacagtctctcctatttcgacgaaggggaagcactggtagtgaggcaaaggatacttctcaatcaagcctagtgcagcaaaggaggtcagctcgggagcagcctgagtctcattcattaactgaacatactcaatgcttggagcaagaatcatcgccccagccgactcccctatatagggcttccctgtctcgatctcccgctggataagcttatccgcccccttgcgcttcagctcctgaaggaggaaaaaggtatttcctcctgaaatgtagataagatccccacgatagagtgaggcctcaatctcctcggctgaagcctctgcgacatccaaaggttcgactctcagccccaacgtctccaaagcctctcgccccagcccaacatactcagtataggactccgggatgctagctgtggggatgaaggtgacgaccttctctcgcagctccatagggcaagcatgctctagtagaggagctacatcggcgaaagaggagcagaggaacataaaaatatttgagttcattctctgtcttatttgactctaccagctagacctatagggagtgatggctccccatgggcaaacatattatcgcgagcttcttaggctttaggccagtaagtatcgatgagtgactgcttgatattgacttctgcagggcggaagtacttaccgaagagtccccatgcagtgtcgagcattccttcgatatcaacgttgacgtcgatggcaaggagctcacgcgaatagtccgcagcgaagcgaagtgtacgctcgtcgtagtccgttaggtcgaaaccattctccatcttcgtctgagcacctgcggcatcggaaaaaagacggacagcggcattcatcacctgtgggtgatcctcacgtgtcttcttcccgatgacaagctgcttgagtcgagagagcgagcggaaggggtcaatgatgaccttacccacattggagtcacgacgcaggtagagctgaccttcggtaatgtaccccgtattgtcaggtacagcatgtgtgatatcaccaccagagagcgtcgtcacagcaatgattgtgatcgaacctccatcggggaactgcacagccttctcataaatcttagcaaggtctgagtacagcgaacctggcattgagtccttagaggggatctggtccatacggttggagacgatagccaaggcgtcggcatagtttgtcatgtccgtcagaagtaccaggaccttctccttcttttcaaccgagaagtactcagcagccgtcagcgccatatctgggatgaggaggcgctcaacggaggggtcttcagtcgtattgataaagctgataatacggtccaaagcacctgcattgctgaaggtattcttgaagaagaggtagtcgtcattcgtcatacccatccccccgagaataatcttatcgctcttagctcggagtgccaccatcgccatgacctcattaaagggctggtcagggtcagcaaagaaggggatcttctgaccggtgacgagagtattattgaggtcaatccctgcaatacccgtagcgatcagctcagagggttgctcacgacgcacggggttcactgatggaccaccaatttccacctcacgccccgtgactgcgggaccaccatcaataggctcaccataggcattgaagaagcgtccgatgagctgatctccgacctggagcgaaggggccttcccgaggaagatcacttcagcattggtagggatcccttctgtaccaccgaagacctgcagtgtcacctcatctcccatgatacggacgacctgtgccagacggccaccaatggtagccagctcttcattacctactcccgtagcacgaagcatacaggtagccttggtgatgttttctatcttggtataaattttttgaaatgcttttgctgccatagcgctgttagtttttagcacgttgggataccagttcatcggccttagcctgctgcttgcggaattcgtcactatcgaactcagcatagttcatctgtcggaaggcattgatcagctccttgaagaagtcaccaacctcaacgaagccctcgaatgagaattcagtatggcagacctgcatgacacgacgcaccatgaattcctgacgctcaagtgagcagttgcagtcaatgctatcaaaagcatcctgctggcagatgatgaagtcaatgagttctgacttccagaaagtcacgtgataatcaagaggcacaccatcgtccccaagaatattgatctgctctgagatctccttaccgcggatgagccactgtttgagttcgctcacttgatcaatccatccagcccctactcgctcagcgacatagtctgcgaactcagggtattcgagatactttgaatagctatcaatagggttgatcgcgggataacgcttgcggtctgcacgttcctgctctagtgcatagaagcagcgtgctaccttcttagtgttttccgtcacaggctccttgaggttacccccagcaggagaaactgtaccgatgaaggttacggaccccgtctgaccgttcttcagatgaacgaagccggcacgtgcatagaagtttgcgacgattgccgaaaggtccattgggaaggcgtcaggaccaggaagttcttcgagacggttggacatttcacgaagagcctgtgcccagcgggaagttgagtcagccatcagaagaaccttaagccccatgctacgataatactctgcgatagtcatcgccgtgtataccgaagcttcacgggctgccacaggcatgttagaggtattagcgatgatgatcgtacgctccatcaaaggacgccctgtgttggggtcaagaagctcagggaactccttgaagacttctacaacctcgttagcacgttcaccacaagctgcgatgatcacgatgtcagcttcagcctgcttactgatggcatgctgtaggacggtcttacccgtaccgaaaggaccagggataaagcccgtaccaccttcgacgatggggttcatcgtatcgatcatacgaactcctgtttcgagtagcttatgaggacgtggcttgtccgcgtagcaggtgataggacgcttgacgggccacttctgcttcatcgtgatggggtgctctacaccagactcatcgacgaggactgcgatattgtcatcgacagtatacttacccgcaggttgcagactcttaagcgtgtagataccctcaaaggtaaagggtaccataaccttgattgactggaagttctcttcgacttcaccaagccaagctcctgcagtgacgcggtcgccaatcgtagctaacggcttgaagtcccagagcttctcctcatccaaggcgtaagtataggagcctcgcttgaggaatactccatccatcttatcgaggtcattctgcagaccatcatagttctttgagagcatccctgggccgagtgtaacctcaagcatgtgcccctcgaaggtgacggggtctccgatgcgcatgccacgggtcgactcgaagacctgagcataagcgttcttgccattgacacggatgacttcgctcatcagtggcacaccaccgacggtgatgtagcatatttcgttctgggcgacaggaccgtcagcctcgatggtcacgaggttcgagacgataccttttacactaccttttgttgccatgtatcccttattattttgcatgcgtcccctcactggtgaggcaaggcgcttcatgtgattattctgttatctgagtatgtagcttagcgtctctgagccttcttaaagtcctggagtacctgggcactttcacccttaagcgaatggacgatattacggaaagttgcttctcccttcgtctcattgagattagcccatcgctcgaggatcccaaggcgcagatagtagcagagtacattgtcaatatcaaagactcggacaaaagtccactcatccatccactgccacttcagtaggtcgatcaagcgttctcggcgtgcgatatctcgctcttctgcgatctgaaggaccttaggcaggtagggaagcttctccccaagatcaaagtccttagccttcgactgcaagagctgtgtttccacctcacccttcccgacaagatagcgctgaggatcccagcctaatcggcgacaagtgaagacagctaagatattgcggatattcttattcaaggcaaaccattctgtgaggaaggcgctacttgaatcagcgaccgaatcataatagtagctggcgatcaagtcttccaatgctaagcgatcactaccgatctcatcgaagaggcgtggtgctacagcttcagagctatcttgttcatcgctcttcacctcacggtgatagagatcatagacgaagcgagagatatagtctggaaccaccttggggcgtggattacgcttaccttggttagccgccgcagacacagactgtagagcttgcaggcgaattatctctgggctcaatgcctccgcggccttccctgagtagtccacctcatagctttgctcaggctcttgctctggtggagtaagctctcctgcgacgatccaattaagaagctctttattcagtgcttcttgacgcaggacttccagcaactggagatcttgcttcgtgaggatagggaggagttcttcgtagaagcttgcagtagtgaacggaggcttggggctatctaccgtgatattgggtagtccagcgattagtgcataatacttagccatgaatgctctccttaatttatagagtaggttagaagagcatctggttcatctcggggcggaggaagctcttgaaaagctcaataaattcagcctcgccaaactgtaccttgaagctaccatccttgggggcgatggagaagtctgtgggcttacctgcgacagagcgaatcgaaacgcccgactcaagcagggacttagcgtgggaggtgaagtaggagcggaggccttctgcatcagcggtggagatctctacgccacgagtgagatcaaagctttctgcgatcttaaggatgaagcttcggatgaaggcggggtcagatgacagtgcctgtacgctactcttagcgacctcgccttggatctgatcggagatactactcttgagggaatcaacgagctgtgccgtatagaggcgaagctctgactctgtgtttttctttagctcgctggctcggcgctcagcagacttgatgatttcttcggcgcgggctgtggcatctgcctctatctttccagcgcgtgtctcagcctcagcgataaggcgatctgcttcggcttggccttgcttgacgccttcgttgtagatcttctcggtcagttcttgaatcttagcatccatatctgattgtgtttactttgtctactggtgctatgggtgaagggctcttcactcgtgcatagcaaagttaaggaatttatttagataacaaaggccttttaaagcccgtgcaaaacaaagatcaagcgccctaaatatgcgggatctcaactccatttctatacctctctaattaccacattttagccaattaaccagacatattgcaaggctgggagattaaaatgagttaagttcgctaacacagcaaagaggcgcccctaccaagtggtaagaggcgcctcttttatagttgtagtacccgtggggctacttgatcgtcatctcatcgatcaggcgagagcacttgccccacttatcgatggtgaagagaacgtagcgaatgtcgactacgatcgtacgctggaggttgggctcgaactcgatatcaccgctcatagcttcccagttcccgtcgaaggcgagaccgaatacacgaccattcttatcgaagacagggctaccggagttaccgcctgtgatgtcgttcgtcgagataaaggctacgtggagcttaccatccttcttgtctgcccaacggccccaatcacccttcttaatcagctcaaggaaggaggggaagacgttgaactccgtagactcggggttattcttctcgaggataccacggctggtggtgaagtagtcatactctacagcgtcagcgggactatagcctttgatcgtaccatagctcatacgcatcgtagagttagcgtcactaggcataggcttggaggggttctgctcacgacggccagcgaagtaaagacggttgccacgatcaataggttcgtagagaggcttcagctcgttagagaaggccgtatagatctcccacaccttattcgaaagcaggacagcgggatccttgcttaggatttcggcagcattgggctgctgaagggtcgcaagaagcttatccttgtaggggacgacgctattagcgaagagcgcatcagcataagcctttgtatcgccaccatactccttattaataaggtcaaagatcggagctacgcgattagcatcgacgcgctgacggacgatgtcaagcatagcaggcaggaccttctggtcaagtgcaggcacatagtccttgtagagatcattgatcatctgagcgagctgctccttaggctgagaagcgagcttcttgaccttagcgggatcgcccagaccacgtgcagcggagacgatctctgtaccaccgatgagggcttcgcgcaggtacatagactggcgctcgatgttaccaagcttcttgtatgcaccttccatttcggaaagaatacccttgtaagcctgagccttcttgcccgaagcagctacccactcttcgaaggaggcttcttcagcgcgcttctgatcgaggacgccgagcttgacgagcgccttattcatcccgatagagttcttccaatagttggagctacgggcgtacttagaggcgtacttgatgcgggtagcctgatcagcattcatcgctgcacgccagatatcctgcttgatgccacggacctcgatacgaggatcgttctgatccttcatgcggttctctacagcgaaagaagggatgtagcgcgaggtcgagccagggaagccgatagtcatcgcgtagtcattcttctcgtagccttcggtagatacggtagcgtggtacttgggcttgtaggggacattgtccttgctgtagttggctggagcattgtccttgttagcatagacacggaagacagagaagtcgcccgtgtggcggggccacatccagttgtccgtatcgccaccgaacttacctacagatcccggaggagcgaagacgagacgtacgtcgctgaagacatcgtaggtaatgagatagtacttgttgttggcatagtagggacgtacctgtacacgcttgtgctcgctcttgaggcgcttgctctcagcagcctcaaggctctgacagatcttctggatctgcgagaggcgctcgatttcattcttgggcttcttgagctgagcaaggatctccttcgtgacgtcacggatagaggagaggtagctcacggtgagcccttcgatggggagctcttcagagaagctctgcgagacaaagccgtcacggagatagtcgtggtcgacggcgctctgcgactggatagcgtcgaagccgcagtgatggttggtgaagatgagaccttggctggagacagtgaccccggtacagccacgaccgaagattacaacggagttggccacgctgggcttgtccaggttgtaaagggagtcaatggggagacggaagcccagttccttcatctgagcgacgttctctcgcgtgagctcattgagcagccacatccccttatcagcctttgcttggtagccgatagagagggcggcggtcgccagcacgagccccttctttagaaattgattcatagacttacgatctgtaatatctgtaggactttaatactgcacgctacaggtgtgcggtgtaaagatacgaattataatgggcgaccctatatagaaaggcgctctcactctatgatgtacgaccttcacaaggtctaagggaagtctctccttccaccataggcagagcaccaagcgacccacacgagggacggaagcgaaggagctccttctcctcatctattcctctaaaataaagcagctaagctctgtggctgaaggaggcaaattcggcacctgtccaagacgtatacgtttcgtgcctgaaacgtatacgttttgactgcgaaacgtatacgttctgctccgagagcccataccttagacctccctacccttgccccaagcccctcctttgagatgccgcgcaatggtctcatatagctttctctcgattcctatatagctttgtgaagtgacctctatttaggtaattgctccacgtaagaataaaagttgtggacgagtggcagataagtttgggctacgtacgtagatttaatgtctacgtacgtggatatttagattgacgtgcctggtctttaagactacgtgcatagatagaagaaaaacactacgtgaaggcgcttttttcttcataagaaggacacttttccctccgctgaataagaggaatactcacgacaaggcgaagtgtttgtgcatctctttggggaggcatatcgggggagctgggcgtgtgatgccttagcagaataaatagagaacaggactctgcatacgaatacagcagcaatccccgtataacacgtagtgaaaaggtgtacctttgcagaggcacacagcggtgctgccccttccccacggggcttctctcgcacgaccactacaattaatatccattatgcagatcaaaaagcaactcatcacgcttggtctcagcgcgctcttggcacagggagttcttcccgccagcctcagtgctcagcagaccaagaccgagaaggtcccaggcatcagcctctccgatatggaccgaaaggtacgccctcaggacgacttctaccgctacagcaacggaggctggatacgcaagaatcccctcaagcctgcctacagccgcttcggcaccttcgacatccttcaggatacagctacttcgcagatccgccacatcgtagaagagctgatcgctaagcctcagactaagggcacgaacgactatcgtgtcgccgtcctctacaagcagtctctggatagcgctgagcgcaatcgccagggctacaagccccttatccccgagctccaagcccttcagggaatccaaaccaaggacgacctcctcaagcacatcgctcagcaggaccaggtctatggtcagggctgtctcttcggcacgggcgtcgcagctgacgagaagaatagtaccatgaacatcttcctcttcacgcagacgtctctcggcctcggttcgcgcgactactacgtcgagtctacccccgaagtcaagcagatcctcgccggctacgaagcctacctcgtccgcatcctcaagctctcgggctactctgacgccgaagccagccgcatcgctaaggctaccattcgtatcgagacggagctggcccagttctcttactccaacacggagctgcgcgactcacagaagaactacaacatcgtgacgatcgctgacttcgcacgagacaataagggcttcgactggagcggctaccttcgtctgcgtggccttgacgtcgccacggcgaacttcatgcagctgaacttcttcaaggcctttgacaagtggtactcctcagctaaggtcgaggacctacgtgacttcctcacgggacgtaccatcagcggtgctgccaactcgctgagtgatgacttcgtccaagctcacttcgacttctttggcaagcagctcagtggccgcaaggagatgcacccacgctggagacgcagcataggtgtcgtacagagcgtcctcggtgaagctctcggtgaagtatacgtcaagcgctacttctctcccgaagccaaggagcgaatgatcgagcttgtgcacaacctacagaaggcactcggtcagcgcgtcgaagccctcagctggatgagcccagagacgaagaagcgtgcacaggagaagctgagcagcttcgtcatcaagatcggttaccccgacaagtggatggactacagcgccctcgacatcgatgagagcaagacgtactaccagaacctcgaggctgctacacgcttcatgcaggcagacaacctcaaggatctcggcaagcccgttgaccgtacgaagtggctcatgagccctcaggaggtcaatgcctactacatgcccacgaccaacgagatctgcttccccgcaggtatcctgcagcctcccttcttcaatatggatgcagatgacgcagtgaactatggtgcgatcggtgtcgtcatcggccacgagatgacgcacggcttcgacgacgaaggatccaacttcgataaggatgggaacatgaacaactggtggacacccgaagaccgtaagaagttcgaagccaccacgcagcgcctcgctaagcagttctctgctgttaccgtcgctccaggtctcaaggccaatggggagctgacgctcggggagaacatcgctgaccagggcggtctcaccatcgcttacctcgctctgcagatggccaacgaaggcaagcaggtcgctaagatcgacggcttcactcccgctcagcgcttctacatcgcctatgctcgcctttgggggcagaacatcacggaggccgaaatccgtcgcctcacgaagcttgaccctcacagcctcggtctgcttcgcgtgaaccaggctctgaagaatattgatcctttctacaaggcattcaatatccgcccaacggacaagatgtacatcgcacctaaggatcgtgtcgtcgtctggtagcagggcttaggggagctcgcttccccactctactatataataatgtagtgccctcgcacgagagtgaatctctcctgcgagggcacttgtcttaacatcctcttccgtcataaggtcgtatctttgtgccgaaaaatgagtacaacaaacagactgacccgccaagagctatcgcagctcttcagcatcttcttcaagataggcatcacgactatcggtggagggtatgctatgatcccgatgatggagcacgagatcgtcaagcgtacgggatggctcacgcaggaagagttcctcgacatactggcagtagcacaggctaccccagggatctttgcagtcgatatggctggacatatcgggcataagctcggtgggctacgtggcgccatcatcgcatcggtagctaacgtcctcccctcgttcgtcatcatcctcatccttgcgacagtcttccagcagttcaaggagcttccactcgtgcaatatgccttccgtgcgatacgacccgtagtggtagcactcattgcggctcccgtcttctcgatggcacgctccgcatcactctcccgctatacgatatggatccctctcgtagcggccatcctcatctatttcttcgacgtctctccagtctacatcatcctcatcgcggggatcgcagggtggatctatggttacctgcagagacgacgctctaacacagatgcccaatgatcttcttccagctcttcctcatcttctctaagatcggtatcgtcggcttcgggggagggtatgctatgctctccctcatccaggacgacgtcgtcataaaagagggttggctaagcgcagctgagttcaccgacatcgtcgccgtgagccagatgacgcctgggcctctgggcatcaacatggctacctacgtaggctacacctcggtactcaacgcggggtatccacccgccatggctttcttaggctcgctcctcgcgaccttctcgatcctttggctacccttcatcctaatgatggtcgtcagccgcttccttctgaagcataaggatagtcccctgctgaagagcgtcttcggtgcactccgtcctacagtcgttgggctcgtcgcagcagcggctatggtgctgatgacagcagagaacttcggtacgcccgacacatcgctcacacagttcatcgtcagtctcgcgctctttgctatagccttcatcgccgtcttccgcttccgtgtcagtcccttgctcatcttggcattggctggatgcttcggcgtggtcttctatagcttcgtcccagcttaacacccgatacctctctatatgtctcatcctacgacgcccgcccctatcggagtctttgactcgggctacggcgggctcaccatactctctgagatctgccgacagctccctcagtacgactatatctacctcggggacaatgcacgatcgccctacggcacacgctccttcgatgtcatcaatgacttcacactccaggccgtgaagtatctcttcgacgctggctgtccgctggtcatcttagcttgcaacacggcttcggccaaggcacttcgtgagatccagcagcactacctgccctactccgaagatcctacccgtcgtgtcctcggtgtcatccgccccaccgtagaggcgatctctcgcttcacaaagagtcgtcatatcggtgtcgtcgccacaccaggtaccgtctcctcacactcctatgcgaccgagatcgggaagctcttccccgaagtcaccgtagaggagcaagcttgccccatgtgggtgcccctggtcgagtacggagagagcaatgcgcctggtgcagactacttcgtcgagaagtacacggccgagctcatgcagcgcgacccgaagatcgataccatcatcttaggctgcacgcactacccgctccttcgtccgaagatcagagaagccctccccgagtccgtcgagctcatctctcagggtgaactcgtagcctcttcgctggcagactacctcctccgacatcccgagatggagcatcgtctgagccaaggtggagagatatcctaccgcacgaccgagtgccccgagaagttcgaagaattagcctccatcttcacgggaacggaggtccgtgccacccgcgtcaagatcactggatagatgatgaccaagaagacctttgctctcctcctcgtaggcgccctctcttgggctgcctctgctcgtgcacaaaagctccccacacctatcaccgtgggtgctgagcgcatggagctcctcctccccaccctccagggcaagcgcgtcgcgctgatggtcaatcagagttcgctcgtcggcagtacgggtacgcatcttgtagataccctcctctcccaaggaatcaatattgtacgcctcttcgtccccgagcatggtcttcgtggcaaggtcgatgcagggaagaatgtacgtagcggtgtggacgagaagacgggacttcccgtagtgagcctctacggacagcgcaagcgcccgacccccgagatgctcgccgatattgacctcctcgtcttcgacctgcaggatgtcggtacgcgcttctatacctatatctcctcgatgcactacctgatggaggcttgtgccgaagaggggaagaccttcgtcgtctgtgatcgccccaaccccaatgacttcattgatggcccgatactggagcccgactgtcgctccttcattggcgtagatccactgcctgtagcccatgggatgaccgtcggagagctggctctgatgatcgatggggagcgctggctaagaggaggaaatacctgccacgtgaaggtcatccctatggctggctggtctcatggtgatccttacgaactgcccgtgcgcccgagtccgaacctccccaatagtcgctccatcgagctctacccctcactctgcttcttcgaggcaactatcatgagtgtggggcgtggcacatcgaagcccttccaagctatcggctaccccgacaagcgcttcgggagcatcgtttatacccctcagatcaagctcggcgaggacagcaaccctcggcataagggcaagctctgctatggcactgactatacttcggtcagcctacccaagcgacagatcgcactcggcccgctcctggactactatcgcaaggcagatagtctggggcttcagttgatcaatcagcgccaactcttcgacctcttagctgggacaaagaagctccgacagcagctaagctctggccttagcgaagaggaaatacgtgcttcatggcaagcaggcctcaaggatttccaagccaagcgcgctcgctaccttctctacaccgattaccgctaaggcattttcgccctgaataaatagccccgacatacatgctgtgtgttggggctttcttatgaagtacaacgccatctacgagcgatttagagcaagacgtataccctccacgagtgaaacgtatacgtttcgagcttaaaacgtatacgtcttgggcataaaacgtatacgttttgcccagacaaggtatacgtatcactcatccctatagcctcacgcatgcttaaagccatactgcttccccgtagaaacccagagcatcattatgaagagaagagctacgtcaccatgccacggggtgggttttcagctgtgaaagctgtatttttgtcttagcataattattcattcatatacgaccaagttacccatacaccctatggaacgatataatatcgccgttatcgctggtggattctctggcgaatacgccgtatctctgcgcagtgctgcaggccttctctcgtggattgatcgcagccgatttaccccctacctcatcgtcattgagcgcgatggatggtatgtacgccccgatggagaagagacgaaggaatctatcctagttgataagtgcgacttcagcttcaccctccgaggtgagcatatcaagctcgactatgccctgatcaccgtgcacggcacgcccggagaaaatggtctcttgcagggttaccttgacctcgtcggcgtcccctacaatacgggtggtacactcaccgaagcactgaccttcaacaaatactactgcaaccgctacctctccacctatccgaacctgcgagtagcagactccgtacgcctgctacgcaatggcgctcgcccctcctcagaggagcttatcgagcgcctcggtcttcctctctttgcgaagcctaatgcaggaggctccagtgtagcaacctctaaggttgagagcctggaggcactggacaaggccgttaccctcgcctttgacgaatgcgatgaggtcctcctcgagcgcttcattgcgggcacagaggtgacctgcgggtgctatcgtattggcgacaccatcacggctctccccgtgacagaggtcgtgcccaagaatagcttcttcgacttcgaggcgaagtacaacggcgctgtcgaggagattacccccgcacgcattagccccgagctcacagcgctgatacaagagctcacccgtgagatctatcagcacgtcgatgcccgcggtatcatccgtgtcgactacatcatcgaagccgatggtcgcccaaccctcctcgaggtcaataccactccaggtatgacccccacgagcttcatcccccagcaggtcaaggctgcaggactgacgatgcaggacctgctgaccgaccttatccaggatcatctctcctaaccctcaccaagcacaccatccactatggatctcaagaaatacgaaagcatccgtccgctggcacccgaagaggtacagacggctatccagcacctgacgagtctcgagccccttcgtgccgtctacgagagcctacagctcgagcagtcgtgggatgaattggtcgaagtgctcagcgcctgccgtagcgtcgaagacttcaagcgtgctgcgagctatcactgggtcaagcatatcatgcgcaagtgctgtagctctgtcgagctcacgggtaccgaccacatcacgaaggatggcgcctacacctatatctccaatcaccgagatatcatcctcgactcagctttcctcaatgtactcgtagcggacatcgatgcgaagttccccgagatcgctatcggtgacaaccttatgctctacccctggatcgagaccttggttaagctcaatgggagcttcctcgtgcgacgcaacctccaagggcgcgaagtcctactggctgctcgcctactctccgagtacatgcacgatgccatcgccgaagggaagagcctttggatcgcacagcgtgaaggtcgctcaaaggactccaccgacaagacacagcccgcactgctgaagatgcttgccctcggggcaaagagccgccagcctcttgaagcccttgcaccactgaacattgtccccgtgacctgcagctatgagtatgacccttgcgactacctcaaggcgcaggagatgcagctcaagcgcgacgtcgagggcttcaagaagagcccagctgacgatggtatcaatatgcgtacagggatcttcggctggaagggtgaggtctccttccacatcggccgtcctctcaatgaactgattgcctcacgaggcgagacggcagagcattacagcactcccgaagccatcgctctgctcattgactcagagatccacagccactacaagctctactccatcaactacatcgccctcgacaccctcgagggaggcaagcgaggcatctgcgactacagtgctgaggacgaagccaaggccctcaagtacatcgagagccgcatcgatctggtcaagctccccgatgaacttgcactcgaccgcacctatctccgccactgcctgctcaccatgtacgctaaccccgtacgaagcatgcttcaggcacgacagggtagcatagcgaactcaggagcataggatgaaggcaaagaagatacacaagtatctggggatcccactctgctttctactcttcttggcagccctctctgggatcatcctcaaccaccgagacctactacagagcatagacattccccgtgcagtcctccccagcgactataagttcgagaagtggaataatggggctgtacgaggtgtactccgcgccgacagcttagcctatatctatgggggcgcaggcgtgtgggtgaccgacagtagcctacggcgtgaggcacgaccactgcatacgggctttgtccgtggcggtgacgaagctaagattatgtctatggcgcgagatacaatgggcgggatatgggtcgcctcgcagtatcgcctctatcgcctggctcctcagcgtgaccgatggatcgagcaacccttaccgagctctgtacgtgggcgcttggctgatctacagatcacgggcgactccgtactgctcctgagccgctccctactctaccgccgttcgcttagtgatcccagctggacgacctacgagctgaagaagcccgatggatatacggggaagatcctactcttccagatcctgtggatgctccacagtggagagtacttcggcctcacgggacgaatcatcgttgacatcatcgggctcttcgtcatactcctctccatcacggggatcttctacactatcttcagccaccgcctgatggcgaagaagaataagcacgggacgaaggaggccaccgagaagaagagacaactctcacgcaagctctccatccacttcaagtggcataaggtcatcggccttcacctctactatatcctcctcttcgtcttcatcacgggatgggtactccgtcctccgctgatgattcccttcatcctcacgaaggcgcgtccgaatacctttagtacactctatagcgcgaacccttggttcgaccgtctgcgtggtattcgtgaggatcaccaaaatggcgggtggctactctcgacgagcgagggattcttcaagctccgtgacttctcggctaagccggagaagtgggagctccagcccgaggtcagcccgatgggagtcaatggctttgctcagcgtcctgatgggagctggctcatcggctcctttactgggctctttgaggtctaccctggggagaaggatcctatacgcaactacttcacgggtgaggtcatccgtgaggtaaagatggggcctcctataagtgactacctggtctctggacttctcgcaggagacacacccagcgaggactacgttttcctccactaccgaggtgccgtacgtagagcctctgatcacaagacgggagcacaagagctccccttcgtccaccagcctgaggcgctcaatgagatgccttattccctgtggcaggcagctctcgagctccatgctggacgcctctatcgtcctttcctcggcaagtgggggacggatctattcatcttcttcctcggcctcgcctctgtcatcgtcctcatcacagggcagaggaaccgacgcaagaaaaagaaacaagctaagtacgactgatgatacctatatataaggtatgggaagccctcacagagaagctccctactgcactacaagagagctacgacaactgtggcttgcaggtcggcgacccttcgcagatagctacgggcgtactctgctgtgttgacatcaccgaggcagtcctccaagaagctatcgctaaggggtgcaacataatcatcgcccaccaccccctcctcttcaaggggctaaagcagatcggcacctccagctatatcgagcgctgcgtacgcctggcgatacgtcacgatctcacgatctatgcagctcacaccaatgccgacaatgcggatggcgggctgaactacctcttagccgaggagctgggactagagtccgtcacagccttagcccccatgtccgacacgctcatggagctagtgaccttcgtcccagcgaaggagctgaacctagtagccgaagcactttgggtcgcaggtgcaggctcaatcggggcatacgacagctgtagctatcgttgctccgggcaggggacattccgtgctcttgacggagctcatcccttcataggcgagatcggacagctccatgtagagccagaggagcggctgagcctcaccttccccgcctacctgcaacgtcaggtggagaaagccttgctaaccagccatccctacgagacacccgcctacagcgttacccgactgcagaacgtccatccacgtatcggtgcgggcgtcatcggggagctccccgaagcagagtccgtagagagcttcctacgcagagtagctgactacttcaagaccgatcagcttcgttacagcgtgactgagaagaccgccatcaagcgtgtcgccatctgtggcggagctggtgcctttctctggaagcaggccaagcgaacaggtgccgatatcctcattacaggcgaagccaagtacaacgattacttcgactgtgaaggagctcccatcctctgtacggtggggcactacgagagcgaatgcattgcggcacagctcttcgcacagatcatctcagataaaatgcctaactttgcggtctatcaaagcgagttagactccaatcctataaaagcgttacagcatccataatggcgaaagaaacaacgacaaagaagacgaccaccaagaagtcaaccaaggctaaggaagtagctaccccagaggtggccacgacagtagcaagccctgaagctaacgttagctctgccgaccggacggtagcagacaagctcatcgccctgagtcgcctacaggagaccttcaccaagatcgaccatatcaagaccctccgtggtgaacttcccctcgaagtacaggacctcgaagacgagatcgaaggtatggagacgcgcctcaagcacctcgaagaggacaacaagcgccaggtgcaggctgtagctaccgagaaggctaagatccagaaggctgaagagcgcatcgaggaatataaggagcagctcaacaacgtcaagaacaaccgcgagtacgacaacctctccaaggaaatcgaattccaaggcctcgagatcgagctctctcagaagcgcatcgccgaagggacgaccgagatccagcaccgcaaggagcgtatcgctactctcaaggaaactatcggtgagcgccgtgtagacctggaggctaagcaggaggagctggcacgtatcaagggtgaaacaaagcaggaagaagaatctctccgtgctgaagctatccgcctggaggaaggtatcgaggagcgtcttctccacgccttcactcgtatccgtgaaggagcccgcaatggtcttgctgtcgtacccatcgatcgtgatgcttgcggtggttgcttcaacaagatcccaccccagcgtcaggtagatctgaagcttcataagaagatcatcgtctgcgaatactgcggtcgtatcctcgtcgatcccgaactcgtagaggaagctcaccagcacaactaagaagggagatgcgctctcttctcgaagctcaggtcgccacgaccatccaagagcatcgactcatagatagcgccacccagcgtatatacatagccatcagcggaggggccgactcggtcgctctgctgatggctatgcttgctttaggctatggcgaaagactcgaagcgctccactgcaacttcacactacgtggcgaagagagcgactgcgatgaagccttcgtgcgggagctatgcacgaagctcaacgttcccttgcaaatcaagcacttcgatactcgaaactatgccgagaataagggcatatctatcgagatggcagcacgtgagctacgctaccagtggtttcgctcctttactgaaggtagtgaagacagaaaggtcgtagccgttgcccacaatgcagatgaccaagtagagaccctactactcaacctctctatgggtacaggcatccgtgggctcagtggtatgccgttcatcaagcaggcagaaggtatcatccgcccactgcaagggactccccgtgcactcatacttgactatctgagcgctcttgggcaaagctatcgtgaggatagctcaaatagcgatacccgctataagcgcaatctgattcgccatcagctcatccccctctttgaggagcttaatccttcctttcgagcgacgacctaccgcacgatagagcacctgcgctcgacggaggccctctatatggaggtgatcgagcgctaccgatctgagctactatcccccaacggcttggagtataagccccttgccactcatcccgagcgaacgaccatcctcttcgagctcttacgcccctatggcttccagcgccctgtcgttgaggaactcagtaagcatcttgcagaggggacggctggagcaaagttctactcccccacccacctactcattcatggtgtacagctgctggagttactcccacgtgaggagggagcagcagtatccctatccattgacatcagccaagacgggcagtgcgcacttcccttcggaggagaactacactgggagctcctttcccttagtgctctaaagggtgtctaccgcacacctcgagaggtcgcagtctttgactacgataggttagagtcccaaaggcttaccatccgttcacggcgtgagggcgacaccctccgccccttcggtatgtcggggaagaagctcctcagacgcatactcattgacgggaagttctctcaccgctcgcgccgtgaagcccttttgttatgtcgagaggaagcccccatctggctcatcggtcatgtggctgaccgcaccttcgcactctcagatacgacgcagactgtactacgcttcacctaccacaagtagcagccagacaaacgaagtcgcccgcttggcatgagtaccaagcgggcgacttctttatttgtgaacgattatgagctactaattgagaccgacctcacgagcatagatctccagatcatcacgctcctgcagaaggagttcgacagagcagcggacaggtgctccgagactcttgagcttggcgaggcgatcaagagagcgcagtgctaaagaataaagtgtcttagagaggctccccgtgatcttcacctgcgcaagggccaaagctacgatgacacgatccgttcggcggagctgctccagcaatgggcgcccctccagagtgaggttgcgctgggcttccagctcctcataggtctctcccttaggcgggcagaagggtagatgatagagcttggatatcaatgaagctgggtaatgagtaaggtctgccttgggtcgacggcgcaggaggtcactgagctcccatagggcatcactcccctcatcattaccgaagggtgctgcatcttggatactggagtaatagacctccgagccaaagtacttgcggaaggtcgggtggctggtcaggggatgcagccccatctcatcgtcgtcatagtagaaggactgcatcggatcaaagccagggaagtcctggaagcctgcctttagctttgcgtcgaccaactgctgggcacgctcttcgcactccgctgcgtcggcaaacgacttgacctcatagcgccctgatgtagataccttaccccagttcgtcataaggtctccccccagcgtctctatacgccagtagcggtcggcctgatgatctgacaaacgcattactctattcatactcatgcgatcaattgattggtaggagcgcgctgtattgtgaggttacgatggtaaggcttccggcgacgatgctccctaatgtggtagacaaatgtagtcatttataatatgaaaacctattttaccacaaatttgatctcttccctttaaaaacatgagtagctacaccctacccttcctaaagcgagcgagagcaaggaggcccttcgtagggctattccttgctctctgctgtatttgtccggaggtgttttttcagcctgctttatcaagctgctactcgccgaaacgctcgcggatgacctccatgagtccagggcggaagtcagggtgagcgatacttgtcaaggccaaggcacgctcacgaagcgtcagaccacggagacggaccacaccgtattcggtagcgatgtagtcgacctcattgcgccctgaggtcactgtggctcccgatggcaagactgggacaatgcgcgagcaagtgccgtcctttgccgtagaggtgaaggctaagatggagcgaccgccacgcgagcgctttgccccacgcaggtagtctacctgcccacccgtgccactatattggttgagtccaatagcttcggatgccacctgcccatagaggtctatctccagacaggagttgatagagaccatgttgtcattctgcccgaccatataggggtcattcgtatgatcgacggggtacatctcgatcatatcattcttattgacgaagtcataaagtgccttcgtacccataatgatggaactgacgaccttacgtggatgcagggtcttcttctcacccgtcacattgccagagttaatcatgtgcatgacgccatcggtgaacatctccgtgtgcaagcccagatcttttcgctctcgtaggctctgaagcacggcatcggggatcgccccgataccgatctggagcgtatctccatcgtggatgagttcggcacacagctcaccgatgcgctgctcgacaggcccgataggagcaagagggagctccaccaaggggcggtcaacggggacgatatagtccagcttcgtcacatggatgaggttgtcccctccgatgaagggcatctgcttattgatctctgcgatgacgatccgcgcagcctctgcggcgggcttggtatagtcacacgacaccccgaaggagcagtagccctcttcattgggctcgctcaccgagatcagtgcgacatcgacaggatagataccattcctaaagaaatctgggagttcatggaagtgacaagggagatagtcgacacgcttatccaggtaagcggggcggctattcttgtcaaggaagttaaggacgggatgtacatgccccaccatctctgggcggaggtgccaaggctcggcaaagtacagcatgtggaagacttttacgtccgtgaggcgctcgcgatcatcgtagagggctttggagagactgctgggggctgccacagcatggccaaagaccaagaagtccccgctctttactgccgatcgcacggcgtcaagggcggtcgtagtatggcgagcaatgtgctcttgccaggtagtgctcattgatttagctcttatatgaaaaagggctcctgtgtagtattaggagggccatcttcccaagagacgtaggctaacgaccccagcaccctggggtacaaagctgcgactccgatgaagaagcctatcaaaggtaagtattctacttttccccaacaataccccccttccactcctcaccaaagctggcacacgcccgcataccttagttgaagtcgagcgtgcttcatccgtcacattttgacgataagttgaatagatctaactttatcgcagaaataaacatagtgcattccgtacataagcgctataaggagcttaacatctccaagagaaaacgcatcaccatccacccaacgcagggaagctacccaaggatcgcttcaaagaatagacacagataccccgcctcatcttaattcaaatcaatatgaaatcactaacgcccctacttattgccgtgagcatgctactctcgagcttcgctctgcatgctcagcgaaccacagagttcttttacctcggcaacgtgtactgcaagactaagactggagtcgagcagcgcttcccctatctaccggtctacctctccctccaagataagcccaatgacatcatcgcagtcacgatgactaatgctaacggagaggcttcattcaagggtgtccctatagacccgtacaagcgccatgtcctcacggtacatctcccgagtggtacataccgctttgtccgaatccctattgaaaagaatccaggcttcactggtaatatcagcacgcatatccagcttgatgccatggagaagtacctcacagtatctacaattattcccaagaaggaagatggagataagctggcacttgacctggcgacgagcgctatcaagggtgcccatcggaaggggctgacgatctccgatgcagaaggccttaactacaaactcttcgtctcaggacgcatggtgcaggacaagaagctggctgatgtgctcctcaagataacgggagagatgctcgataagatcgtcatcacacacccgacacaggcaaatgactactatgcggggtctatagacttcatgattcgagacatacctattcagaaggttggtcccacgacctttaccttagagcgcctatgagccgatcattcctaatcgctctcctcttattgattgctccccttcgcctcctcgctcagatcgaggtgcgggggcaggtagaggatgcgaagactaaggagccgatcgctcttgcctccgtcacgctggtgagtgagcgagactcaacgctcgtcctcagaggggctacagacctgcaagggggctatctctttagtgaggtcaaggtcgggcgctatcttctacgtattagcttcctcggctacaagcctctggagcgacggcttcgtatcgtgatgcccagccaaggcttcacggtggagcttctcgatcagctacagcaagatagtcaggtgctggagggtgtggtcgtggaggctcaagctacgcatcagcgagccgaccgtagggtgatcacctttgcccgtaaggatgtccaggaggccctacacagctatgatctgctcaagaccctaccctcagtcagcttcgatgtgatgaacgaccgtctcaagggagctatgggtggggaggtgcagctcctgatcaatgggatacgctccacgaagacggatgtacttatgctgcccaaagagaagatcaagcgagtagaggtctacgacattccccctgctcgatatcgagcagtagagtgtgtgatcaatatcatcgtctccggactggacgacggctacatcgcaggtggctcactcaaacatgccttcactacaggcttcggaaatgacgaggcctacgcctctctgatcagtgggcgacataagctgagccttgagtacacgctgaactatcgcgactatcgtgaccgagagtcacttgcgcagtatagctatagcctcaatcagcaggcactacagctcacctactcagaccatgatgcttttggctatacgacacacagccccgccctcaagtacgcctacgtagtggatgaacgctacctatgggaggctcgcctacagccgagagctgagcgacgcttctctgacaatatcggctcggggctctacactgtagacggtgtcgctggagagaagctgactaccacgggtagagataggacccagcagttcaatccctcgcttgacctctaccattggcgcaagcttggagagaaagatgagctgagccttaaccttgtagggacgctcttctccaccaagcgagagacgaagacccgagagcagggcatcactacagggctcacgagctacgaggacttcatgaagctggacaatagtaagcgctcgctcatcctcgagctagcacacacccgagagacgggacgcttacggatcagttcgggctacaggggagaggtctccttcctacattcacaggtagacaatcacttcggtgcccttgactataccagccgtacgtggcagaactatggctacagtgagatctcggggcgtaaggggagactactgtatcgtgtgagcctaggcttgacccacacgcacaatcattcgagctaccgctcctacagtagcctcgccttcaccccgaaggtcgtactcggctataccctcggtggaggtagtgatctgcgcttgatgtacgatgacaagcccatcctgcctagtctggatcagctcagtagcaaccgaagacgagcgacccgtgatatcactagcgtaggtaatccccagctagagaatgcgcatatgcgccaactgaccgctatgtatacgtatgctaaggggatctttgatatcaagttggtaggtctctatagccacacacatcgcccgcatatccaggctatgaagcgtgagggggcagggatcacgttcgctccgatcaatggagcatggagtgacgaacttgttacggctgctagggtggtcgtcaagccctttggtgacaataccctgagcctagatacgtacctcatacctacgtatagtcgacttcgctcatcggagattagttatgatcgtagttcgctctatggtgagttttcgctgacggcccagcataaggggctacagctctactacaagtacgccctcccgacttatacctatgattcgggctatgcctctcgtatggagccaaagcatactgcctcgatctcctaccgcttggggaactggaagttctctgcctcgatgctattcatcgggacgccggcctattatcatgactatacgctcggtgagcgtctcgtccagagggataataagacgtggatccatgccaataagaatatgatcctccttggggtgtcctatcacctctcacgaggcaaggataagacctactcgaagaaccttcagaacgaagatacctcatctcctacgctataagtagccgagacaccctcacccctgcgggcccatctctatagagcccccctgtatgctccttttaaggcgcatgcagggggctttcttttcggcaaatgcgacgaagcatagcgaaagcactcccgatcctatgcataccagaagatcaaagagctattgtaagtagctgtatacgcatacagatagagtcgtagatctacagaaaagaagtcctgcaccagtagctgtaatccgctatctacgtgggtagtcctaaagtctacgtgcgtagatgataagttctctgtacatagattttaaatccacgtacgtagatataacttttctcgtagagctatgacggaaaagcagcttgagtatggaggaaatgcacctcgacttgatatgattaaccagtgctccagcacccattattaggtatataatagaggtacttacatctaccctatacctacatctatgtattttgcaaaggagtaagaggagggggctatgaatggcgtattttttgcccacgcgatatagcaactttactcactataaatcatagtaataaccatgcgtaagctttacgccctcatgctctcactgcagatccttctggtctcggccatcggtctcagcagtgagctggcagcacaagagcggccgactgatgccaacattattgggcacgtcacagatgcgaagactggcgaacatctctcaggtgtcaccatcgctatcaagggtacgaccttcggtacggctaccgatgccacagggcactacatcctcaagaacctcaagcagaagagcgtgacactcgtcatgcgcggtctcggttatctcagccaagagcgcaccgtggagatcatccctggtaaggtcgtcgaagtgaacttcgatgcagagccagacaacatccgtatcgatgaggtcgtcgtctcctccaaccgtcaggctaccctacgccgtctcgctccgacgctcgtcaccgtgcttgacgccaagctcttcgagagcaccaatgctactaacctcgcccaagggctgatcttccagccaggtgtgcgtgtcgagaataactgccagaactgcggcttcaatcaagtacgtatcaatggcctcgacgggcgctactcacaaatcctcatcgacagccgtcccatcatgagtgcactggcaggggtctatggtctggagcagatccccacgaatatgatcgagcgtgtcgaggtcgtacgtggcggtggctctgccctcttcggctcctctgctatcgcaggggtgatcaacatcatcaccaaggagcctcagcgcaatagcttctccttcaatgagagccttggcttctcgggcttcaaggatctggacaataacctgagcttcaacggctcactcgtcagcgatgacaaccgtgctggcgccatggtcttcgcacaggctcgctaccgcaaggagcacgacgtcaatggcgatggctacagcgagcttggtcgtcttgactcccgctcgctcggcttccgtggctacctccgccccacggactacacccgtctgaccggcgaagtccatacctttagcgaagcccgtcgcggtggtgaccacatcgactggcccgagcaggtagtcggtgtagctgagtccattcgccactccgtatatagcgggaacctgaagttcgacggctacagcgaagactacaagcaccacttccagctctacggctccgctcagcacgtcacccgtaacagctactacggtggtatcggtgagacgaagctccgcaacaaagcaggcgacaagtacattgataaggatggcaacgagactacagatgagggcaaggcagtgaatgcaggctctatcggtcgccccatccatacctctgactatgggaagaacttcggtattacccgcgggatgacgtgggtcggtggtgcacagtacacctatgacttcgaccacttcctctttatgcctgctcagctcctcgctggtgctgaatacagctatgaccgcctcgaggacaagatgcctctaagagaatgggagaccgagaagaccgtcaccgatggcttcgacctcagcgctaaccccatctccctctcccctgccctgcgtcaggtcatccgcaacgccagccagttcgcccagatcgaatggaagaacgatcgctggagcgtcctgctcggcacgcgtcttgatgagaactccgccgtcaagaaggccatcttcagcccccgcgctaccctgcgctacaaccccacgaagaatatcaacatccgcgctacctatgccaagggcttccgtgctcctcaggtctttgacgaagaccttcacgtcggggtcgtcggtggtgaagcacagcgtgtgaccaatgctgaggaccttcgtcctgagatctcccactccttcagcctgagcaacgacatgtacttcaccctcggtggtgcacaggtcaacgtcctcgtcgaaggcttctacacccgtctgctcgacgtcttcacgaactacaaggacaagtctgagaacggtatctcctactacacgcgccacaactatgggatcgatgacaatggtcagcaggtctcctcgggtgccaaggtcctcgggctgaacctcgagggtaagatcgcctatcgctggctctccctccaggccggcctcacgctcaccagcaacaagtacgacgtcaaccaggaatggggcgtacgtcagaaggtccagggcgaccacgatgcggcctactacgagtccttcatgcctaaggctgacggctctgactttgacaatgtcgctgtagacaatgagcctcagaccatctcgatgacctctaaggagatcactcgcacgccctctacctacggctacttcacgatcggcatcaatcccgtccgtccgctgaacatctccctcacgggtaccttcacgggctcgatgtacgtccctcacgtcgtcaagtgggggcagaactccgcagtcaccgaccgcacggctatcgctgctggtctgcgcaccgaaggctataagcttcctctcgtagacgctacgggtgctgctatcctcgaggatggcgcgcagaaggaggtcgatgtcgagtggaacgagctggtcaagaccaagagcttctttgatctcggcgctaagatcacctatgacctgcgtctcttctctaagagcaacgtccagctctactgcggtatcaacaacctcttcaacgccttccagagcgactacgacttcggtccagaccgtgacagcggctatatctacggccccacgatccctcgctcaggctacttcgggatgaagtttaccttctaatcccacccctatcgcccgaggacaagacgtcccgagtgcgacacgatttagaggctgcccctaccttctccacagaagtgtaggggcagcctctatatataggtatatagactatgcaccgaatatcttaaatttgcgggtgagtatatgctggggtacgtacgctctggcacaatcaagacaagcgaatggacactgagaccacctacctcttagcctccccagacacgctggagcccgtagcgcgccagttcatcgaggaggtcctcccctggggggatatcttcgccttctatgcccccatggggactggcaagacgaccttcatcaagaccctctgcgaagccctcggcgtgcaagatgtcatcaatagcccgaccttctctattatcaatgaatatcgcgctgaaccctcgggagaactcatctaccactttgactgctatcgcctggagaagctcaatgatgcgctgaacctcggaaccgaagattacctccagagtggcgcactctgcttcattgagtggccagaggtcatggaggacatcctaccagccgacacggtacgcgttactatagaggagatcgaaggcggggcacgacgcctcaccgcacgctataataagacggaggacaagtaatgcttaatccatttgagacgggtcaggcccgtgtacgcggtagcatcgaggtgatctgcggctcgatgttcagcggtaagacagaggagctccttcgtcgcctgcgccgtgccaagatcgcagggctacgcgtagagatcttcaagccctcagtagacacccgctatgatgagaccgaggtagtctcccacgaccgcaatgcgatcgcctctactccgatagacaactcgtcgaaccttctcctcttagcttcggacgtcgacgtcatcggcatcgacgaggcacagttcttcgatgagcacctccccgaggtcgtcgagcagctggcagaccaggggatccgcatcatcctcgctggactggatatggacttccgtcgccagcctttcggccctatggcgcagctctgtgctatagctgactcggtagacaagatccacgcgatctgcgtaggctgtgggagctgggcgaactactcctaccgcctcgtctctggtgagcagcaggtcatgctcggcgaagccaaggagtacagcccgctatgccgtacctgctacctcaagcacacacaaaccaacaaggaatcctaaccccacgacgataatgaataccaataaactcctcactctcggagcttctaccgcactatcactcacgctcctctcgagctgcgtcatcgctattggctcaaacaaagagcagaatacgacctactctccaagtgggaaggtagcttatgcgatgagccctaccctcggtggtaagctcttctcggcagcctggatccagcgctctgccgagtacaaggcactctgccagcaggcctacaatatcgcgaccgagcgtctcgtagcagcgacatcaactcccttagcctcgggcgaaaagcgctgggctatcgtcaccgacatcgatgagaccatcgttgacaacacggcgaactccgtctaccaagcactcaagggcgaggactactctcagccctcgtgggaccgctggtgcgatcaagctgatgccgtagctctgcagggcgctgtcgagttcttccgcaaggccgatgccctcggtgtggacatctactacatctccaaccgtgatgaggtcaatcgtgctggtacgaagaagaacctacgtgatctgggcttcccacaggtagaggatagccacttcatgttcaaggacaagtcctccgacaagacctctcgtcgcaatgaagtcctcaagacacacaacatcctgatgctcctcggtgacaacctgggtgacttcgaccacttcttcgatgtacgtaacgaggccgtgcgtgatcagggcgtcttacgcttcgccgctgagttcggcaagcgcttcatcgtcctacccaaccccaactacggtgcttgggagcctgcgatgaacggaggctatcccgacctcaagaccaaggacggcaagctcactacgatccttcgcactcagcggaaataacacactctcctactacactacttaccttagaccatcagaaccccatgcttacacccacacagatacgacagatcactgctctcatgcaccgtgaagtcgtacccgctacaggctgtaccgaaccagcagccgtagccctcgccgtagcctatgctgcggcacagacgaccgctgagccccgctcaatagaagtcctactcagcggcaatatgctcaagaacgctatgggcgtcggtatccccggcacggggaccttcggtatccctatcgcgatcgctctcggtgctatcttagcagcacccgagaagcaactggagctcctcgacactttcactgatgaggagcttcatcaggcccagaagcttgtagcaagcggctgcatccagatcgggctgaaggaaggtgacaacgttgaccgcctctacgtcgaagtcctacttaccgatacagagggccgtctatcgactgccatcatccaggctactcatacagggctcacagcgctcacctatgatggtgaagaccgcttcgtgccacgtaccgccgacacgccctgcacgaagtgtcccgagagtaaggacgaagaggagacgatcgccttgaacttcgacctcgtctatgagtatgctctgcatggtcctctggaggagcttgacttcatctacgaggctgcactgcagaataagcgtgccagcgagttctccttcactcacagctatggccatagcctcggcaatctcatcaatagcgatatgggacgtcgctacctcggcaatacgccccttacgcagatgctggcctataccagctctgcctgcgacgcccgtatggatggtgcccccatcacggtgatgagtaattcgggtagcggcaatcaggggatctcctcgatgctccccgtcctgaccttcgccgaagagcaaggcgcaagtcgtgaggtcgccactcgagctatcatgctcagtagcctcctcgtcgtctacatcaagcagctcttaggtcgtctctcctgcctctgcgggatggtcgtctcagggattggctccgcctgtgctatcacctaccttatgggaggcacgaaggagcagtctatcggagctgtgaagaatatgatcggcaacgtctcggggatgatctgtgacggtgctaagcccagctgtagcctcaaggcttcgacaggcgtgagctctgcactcatctccgctatgctctctatgcagggacacgtcgtcaccgctaccgaaggtatcgtagacgatgatatcgacgtctgcatccgcaacctcgcagacctcggtcgtgatggcatggcccagaccgacctcaaggtcctcaagatcatgacgagcaagggcaagcgtaatgcttagtccccgctatttgggttcaccgatagtgtcccgctcgtctcacatatgtaatcagctactattggatgaacccaaatagaacgatgcactttgcgctcagcttcctggcaggatccctcctgctatggggctgtgcgaaccaaggtacacccgaaggtggcccctttgacacggagccacctcgcctcctacaggcctcacctgcggtgaaggctacgggggtcaatacgcgccacttcaccctgaccttcgatgagaacgtcaagctctcgagccagacggataagatcatcgtatccccaccccagcgtgaggcagcacgtatcacggccaacgggcggcacgtctccatcgtactctccgacaccctgcgccccaatacgacctacagcttctacttcgatgatgtcatcgtagacaacaacgaggacaacccactcgagggcttcagctacctcatctccacaggtgggcagattgactcgatgcagctggccggtcgcgtcatcgatgccttgaccttcgagcctgtcgaagggctcatcgtaggggcttatcccgccacagacatcaacgacagtacgctccgtaagcgccccttcccctttgtcagtaagaccaataagctgggcttcttcactatgcgtggactccccaatagtacctacaaggtctttgcgacgaaggacaacgatgccaactatcagtacagcgaccgcagcgaaggccttgccttctctcgcgagagcttccagacgacgctgcgtgacagtatgcgtaccgacacgatacgcatcgactccatcgtgcgccgtgacacgcttcaccgcgactcgctcgtcacctatcccttcacctactacttccctcgcgacatcgccctacgctattcggtagcgaaggtgcagcagtacggcctcgagcgccacagccgtcccgatagcttgatctgccgaatggagttcctcgctgagcccaagaagctccctcgcctccgctcgctggacaagccaaccgcaccagccgaatccctctactgggctacggctaagggcaaggtcgtcgacctatggctacgagacaaggagcttcttgcgcgcgactcggtgcgcttcgccctcacctacgagaagaccgactcactacttcgcctacaagagaagactgatacgctcgtcttcatcaagccacaggcacgagctaagaagcacgacaaggctgctgaaacggagaagtcacctctacagatcaccctcaccggggcttcggggacttttgctggtactccaagtgatagcctctatgtgacggcctcacgtccccttgtagccctccccacctcagcgattcgcctggaggtacaggaggactcactctacaagcctcaggacttcactatcgtacaagactcactggatcacctgcgctatacgctccgcttcccacgtgcctatggcaagagctatcgggcgcgtattgattcggctgccgtacgcgatatctatggcgctgcctgcgactctgttgctttcacgcagcagatacagaaggaggacgagttcggtcagctcaccatcaccctgcagggtatccgctctcatgccctcgtccaactcatagacaagagcgatgctgtcctccagcagttctatggacatgaggtcaaggcggacacgacgcagaaagcacagcccacggcagcgtcttccaaaggcgataaggtgctcgccgagctactctctaagcaagctcctcaagccgctaaggccgatagcctccccgaagcaaagactccagcagagtcctgtcaagtctccttccacgacctgaagcctggtgagtacttcgtccgactcatcatcgatacggacgacaacgccgcctttacacctggagactaccctgatcgtgcccccgaggaggtctattactacccgcaggagatctccatcaagaagggcttcacctccgaagagcgctgggacatcctcactcagtcacctctgggcagcaagcccgatgccctgcgcaaggtcaagcccgacgaggcaaagaagaagcgcgaggataagaacatcgagtactacaaacgctggggacgcaagcgtcgctaactcctctcctatccacccaaaacagaagcggtacaactcccatcgggagctgcaccgcttctgctattatatcactataccgtggtaggctgttcgcgtctatcaccttgggaacatatccgagttgatcgccacgaagatccgatcatcatactccttttgattgctttccagtccgagcgcatcgataaggtgctggcgagctcgtctctccttccgcctatcaaacttcaatgcagaatcggcagctggatcataatggaagtagagcaagatgacctctggattatcaagaaaacgcttcttgatagccgtccaccacatctgatctgtaggcccgagggataagccaaagagacaaatcacatcagcccccgcaatgagtctaagacactcctcatcgacaagcgttccacggccctcattggcttgtggcttaagtaagaggtctgcgacataatcacactgcctgcactgatcgtttactatttgatcgccatgatctacaccaagcagaattccaccctgacctaatgatccatgcacatgcttcaccccttgatatatcacagggtgaccttcatgcccttccgcataggtgtactctccgaccaacaaagcatcctggcagaggcactcaaatgatgaggtatagttgaaggagatgacgtcaatatgccatgcctgagcaatagtcagagcacaaagctctttctcctctctcggcttgaagtagcgataagggtaggtcaggtcttcacggaacttctcgacctcctcgggagtaggctcaaaactattgcactgcgaaagataggcctctaaggcgcgattcatatcctcgtagaagtcacagaacccatcagcatcatcaccaaaggctgtagtaaactcaccaagagctatctctaagtccttccactgctcttcgccacgcccctctcgctccgccatctcggcaaagaagcgctccttatactttttgatagcctcctcttgctgtatgcgatcagtatcaagcttcggggtttgccccttatagaactctaaaaagtctgcatagcgagtggggagcccaagtctaaggtcaaagccattgcctattaggtagaggacattcatagcgattctatcagtagagggtcagcgtgatgaggtatattgtggtaggcatcgtcccgagtggaatgtgcgcataaaggtacgaagaatgtgcgcacgcatagcgaagcgagagtgaaccaatagtggtaggtggtatgaacctatattggtcactgagcgaacctatactggtctgcacgtgaaccaatagtggtcggagcacgaaccaatataggttcgcacccctacccgatattgactcaaactatacaccgatattgggcggctcataactatcgtcaagcctacgctgttagtaagtcagtaaactaccataccccctacacagtctaaaagaacaggcattatgaaacggaacagtctccgtacactgacccttctgctactactggcagctggagccttaggacttcgagctatgcgcatgcagacacacccttcacccaacactccatccacttcacctatgaaagagatctatttggccggcggttgcttctggggcaccgagcacttcttcaagcaagtacgtggcgtcatctccacagaggtcggctacgccaatggccatacctcccgccccagctacgaggaagtgtgtagccacactacgggctttgccgaagcagtacacatcacctacgctcccgatcaggtgagcctcagcaagctccttgagctctacttcctgacgattgatccgacgtcgctcaataagcaaggtggcgacgtgggtgatcaataccgcacgggtatctattacaccgacaccacagacctaccgacgatcaagaaagcgatcgagacgctacagcgtgagcatgcacagcccatcgtcatcgaggtagagcccctccgcaacttctacgacgcagagacttaccaccaagactatctggacaagaacccatcggggtactgccatatccgccccgaactcttccagatcgctcgcgaggccaatgcttatgtcaagccttcggacgaagagctacgccgtcggctcacccccactcagtacgctgtcacgcagcatgccgccacggagcatccctttgacaacgactattgggacgagaagcgcgaaggcatctatgtcgatatcacgacgggcgaaccgctcttcatctccacggataagttcgactcgggctgcggatggcccagcttctcccgccccattgactccaccctcatcagcgagcatcaggacgactcccacggcatgaagcgtatcgaggtgcgcagtaagacgggtaaggctcatctcggccatgtcttcgaagacggcccgcaggagctcggtggcctacgctactgcatcaatagtgcagccctgcgcttcattccccgcgaagagatgaagcaagccggctacgccaagtacctctccctcctcgagaagaagcagagcaaggcggggaagtaggataaatattatctacatgcaagtataaatgattgattcgaggatgattatcggcatccttgaatcaatcattgtatagaggcatgagccttatagttttttcctcttttccccttttcctcaaaagacaagaagaatactctacggaagagatggctgcactacaataaatcacaaggtaatccgtatatatatttatattaactttgaccatgaaatataacctatcatcttattatggcgacgaccagatactattactccagtgctatctctgaatttattcgagaggaagagacttctatcgttgggaaactaacagaatcttctcaacacgacatcaataagaaaacctcctcctcctggaaggaggagataaacagcttaaaagaggcactcaaagactactccggtagaggaagtatctacctagagtacaatatcccacgcatgggccgtcgtgtggatgccatcgttctcatagatggcattgtctttatcctcgagtataagactggaaggcagacattcaatcaaagcgcacggaaccaggtgtgggactatgccctagatttgaagaacttccatgcagatagcaaagatcggatccttgcacccatagttgttgtcccctgtgctcttaatgaggactgtcagctcacccctaaatcttcagcggacaaggtatatgaacctcttttcactaatacttctcaattagggacagccattcagaatatacttgaccaagtacaagtagctgttcaaccttcacagactgatgatgcctgggctaatagtgggtatgagccaactcctacaatcatagaggcagctatagccctgtatgaaaaacatagtgtcgcagacattacgaagagtggaggggatatcgaaaaggcctcaaaagccctgaatagaataatcgaccattgtcagaaagagaaacgcaaggctatttgcttcatcacaggtgtacctggagcaggcaagactctcattggattaaatactgctattgagctatttaatcaaggtataggagccgtttatctatctgggaactatccactggtcgaagtccttcaggaagccttgacccgtgattatatagagcgtaagagaatcatcacatctaatgaagagaaaaaaactcgcaccaaaaaaggagacgccaaacgcgaggtaaaggcttttatacagatgatccatcattaccgcgaccagtacctggaaggagtagatatcacagctaatgatatcaggcccaaacctggatacttcgagagcaatacagataaagcctacataccagcagaacatgtagctatctttgatgaagctcagagagcttggaccaaagaggagttgcagcgctttatgcacgagaagaagaacatacaaaactttccctatagcgaacccgaatatctcatctcttgcatggatcgccaacgtgattggggcgttgtagtctgccttgtaggtaatgggcaaagcatcaataagggagaggccggtctaaaagaatggatagaaagtattctccgtagatataggagttgggatgtttatatatctcagactatcctagagtcagaagaacttagcgatgaacagaaaagagatattaaaccacaactcaaagatggaaaagatctacaccttgaaatgtcaatgcgctcatttcgatctgagagtgtaagtctcttcataaatcaactccttgatttaaaggttgaagaagctaggtccactctgtatgaactgagaaagaataactatcttatagttctaactcgctctctcgaaagagccaaacgatggctccggagcaagaaacgaggtaatgagcgtatgggcctactggctagcagtaaagcggaaaggcttaaagccatatcaatcaacgtaaagtatagccccaacttcgtccactggtttctagaaaatagccaagacattcggtccagcgatgcactggaggatgcacttactgagtttgaagttcaaggactagaaatagactgggcatgtgttgcctgggatgctgatctaaggataaatatgactggaaatgcttgggagcatttccagctccgaggagggaataaatggcaaaacatcaataaaccagccaatcaggagtatcaaataaatgcctatcgtgtactacttacgcgtgctcgccaagggatagttgtactgatccccgagggtgatgacgttgatacaactcgcaagcgagagtggtatgatcgtacctataattacttgaaaggaataggaattccggagatacaagaccaagatatctaatcaactagctctggtattttagagtaatccctaaccaacgagccttacacggtaaggcatagtaaagaacaagcgatccgtagtagcttatagactactgcggatcgcttgtctctgaaaagtagtaactacttgccgatgcagaagtgggcgaagatgttgtgtaggacggagtcacttgtgatgtcggctccggtgacttcgcctatggccgtgatagctcctcgaaggtcgggtgtcagcaggtcggtgggaaggccatccgttagccccgtacgcacggtccttaggctatggagagccgtcgtgagaagtgcatgatggcgggcattgctcacgacaaggtcggtagacttgagctcgggaagcaccaaggctttgatcagtgccgcacgaagttcatccaagccgtcccctcgctgggccgatatgggtaggatcgaaggcgcttcacccgaaggcaagtactcggtaagtagcgacgaaaggtccgttagtacagcttgcgtggtctgaggatcgatggcatcgaccttgttgagcaagacgaggaagggcttattctccaggcgaggaaggagctggaggagcgccgcacgatagtctttatcggcgatacgcagggcatcgacgaggagaagaacaaggctcgccttatcgatcttatcgtagctgcgatcaatacccagcgcctcgatcgtgtcatccgttgagcgcaagcccgctgtatcgatgaagcggaagaggacaccatcaatattcagcacgtcctcgatcgtgtcgcgggtcgtaccatggatatcactgacgatagcacgctcttcgcctaagagagcattgagcagcgtgctcttccccacgttcgtcgcaccagcgatagccactgggataccacgcttgatcgcattaccaaggcggaagctctcggtcagccgctcgatcttcgccgtcagttcgtcgaggagctgcagaagctgtgtgcgatcagcgaaggtcacatcctcctcactgaagtccagctccagctccataagactggtcagctgcaggagtctctcgcgtagctgggcgaactccgcgctatacccgccacgcatctgagtgagtgccatacggtgctgcgcttccgattcggatgcgatgaggtctgcgacggcctctgcacgacttagatccatcttgccatagaggtaagcacgacgcgtgaactcaccaggggttgccatacgacagccctgatcagtcagagcttcgaggagtgcctgctggatgaagaccgagccgtggcacgagatctctacgacatcttcacccgtataggagcgtggggcatggaagcaagtgaccagaccttcgtcgatcgtcttgccctcgtgagagaagcgaccaaagtaagccattcgatccttagcacgctcgagcgtacggacttctcgacaggagaagatctgatcaacgatgccgacggcttcggagcctgacacacggataatagcgataccacccataccaggcgcagtagccacagcacagatcgtatcactgccgataagcgatgatatcatgagatagtaggaagtaaaggtagggaggagagaagcgcttattcctcaagctgaccacgcttcaggatcgaatggatattctcaacgagtagcgagagtgcgacggagttcatccccccttcgggaatgatgatatcagcgtagcgcttggagggctcgacgaagtcacgatgcatgggcttcaccgtagagaagtattgtttgagcaccgagttcatatcacgtccacgctcctggacatcacgcacgaggcggcgagccaagcgcacgtcatcatcggtatcgacgaagaccttaacgtccatcagttcgcggagctccttgttctcaagtatcaagataccatcaaggatcaagaccttcgcgggctggacacataccgtctgaggtaggcggttgtggtcggtgaaggagtagacggggcgctggatactctgcccctgcttgagctggcggatatgctcgatcatcatatccgtgtcgaaggagtgcgggtggtcgtagttgagcttggagcgctcctcgagactgagatcatcgtgcgccttgtagtagaagtcgtggcagagcgtcgtgacgtgctcatcggcaaaggcctcctggagcttgcgcacgagggttgacttacctgaggcagagccaccagcgacaccgataatcgtggtggatgtagtatttgcttggctcatagctgtagcgagatgataagggatcaagtttatctgggcgtggtggctccgacagcctcatagaccaagtcttggagacgctgacggagacgctcacgtatgagggtcgtattctgacgtgttgggtaggtgcggttggagaggaagataaagatgaggtcatacttggggtctacccagaagcacgtccccgtgaagccctggtgtccgtaggtcgctgatgaggcatagatccccgtaggaccacccgaagagcggggcttatcaaagccaagagctctgatgcccgatgcactcgtcgtctcagtgaagaggcggacggtagagctgggaatgacctgcttcttaccccatgctccatgctggagaaggagttggcaaaccttagcgagttcttcagccgcaccgaagagccccgcattacccgacacaccaccgagacaagctgcagcttcatcatcgaccgtaccacgcaggatctctccacgcaggaaggtatcatgctgtgcgggtgcgatctgctggatctttacgccacgctccaagggattgaagtacagacgtgcttggatggggcgatagatatgcttcgtgacgaactcatctaagggctcaccagagacacgctcgatgacttgctggaggaggatgaagttcaggtcgctatagcggtagctcttatccgatgagacacgagctgagaggaggcgctccatcatccgagtcttgaaagagggcgatagatacttctttgagccaaagcgcagggtatgctcttcggtcgccttatcagagatgtacttatcgaggaagcggaagttcgggttaccccaagccttccctacgagaggcacaccacctgcaaaggacttatagcggatgagcgagccctcatagctcgtatcatcaataaggtcggtatagaagttaatccccgctggtagtccagactgatggagcaggagctggcgaatagtgaccatcccaagcagggtctccttcgtctcggggaggtaactcagcagtggagaattaaggttgatcttcttctccccgacgagaagcatcagagcaggtgtcgtagcagcggccttcgtgatagaagctaagtcatagatactctgtggcgtagcaggctccccttgtcgtcccttgagacccgtaagcgaaccataggctttgttcacaagcacctcaccttggtagaaggcaaagatctgacacccaggataagcccctatgcgaagcccagcctcagctaagctatcgatacgagctaaggctttggaggatactgattcgggagcaaggatatgctcagtagctgctggcaggctatctaccagcagactatcaggctgctgaggtgtctgcccatagagagtacccagctgaagaagcgagaggagagcaacgagaggacgggagcgcatagacatatggtttagcgacgagccttcgacgtagactgaatagccttggtctttgccgtaggatcttctccttcaccagcagatacatcagcttgccagaggcggctacgaagcgaggcttcttcgggagtccatatctgcttcttgacctcagccgcagaggcttcgggagacttcttcttgatgatcagcgcatacttgaaggccaagatacgacggcacttctcttctacttcggcttcactcacctcacccgatcggagtgcttggatgattgcattacgagcttctaaaggctgtgaagggccgaggaggatatcattaccagctttcagggcttcaactgctaccgaggtcacgccattagcctgagcaccgcgcatctccagagcatccgtgatgacaagtcccttgaagcccatatcgtggcgtagaagatctgtcgtgatcttacggctaagggaggcagcacgtcccgtggcatcataggctggtacatgcaggtgggcagtcatcacgccacccagtcccgcatcacgataggcacggaaaggatagagctcgacacgctgcatacgctcacgtgaagccgataccgtaggaagtgtcttatgagagtcttcggaggtgtcaccatgcccagggaagtgcttagcgacagagaggacaccgccctcttcgagcccctgaccataggcaacagcacagcgagcgacgagctcagggctatcgccaaagctgcgggtaccgatgacgggattcttaggattgatattcacatccactacaggagcgaaattgatgtggatccccatcagctggcactgacgagcgacctcagcaccataggctttgatgagctccatatctcccttgatacccagccccttactacgaggatagcgtggtgcatccttgagacgcatatagagcccccactccccatcgagagaaatgagcatgggcacagtactagcctcttgcagagtctgtgtcaagtctcgctgatcggcaaggaaacccttttggaagagtatcccaccccacttctcctgcttcatacgcttcagcaaagcagacttgtcctctggacgtgggtagataatcggcatgatcaactgccccacacgtccttctaagtcgaggctcttatagacgctgtcgacccagcgctgctgtgcagtaggatcaataccacggaagacgaggagggcttcttgtcgtggctctgtcttcttgggagtcttactctcctttggtgcagagaaagcatcaaagctaagagtgcagcacagagcaaggcccagtaaatatcttgagggctggaaggtgattgtagccattgagagatataaataaagcgcttagggcttctgcttacggaagacccaaaagcgctgtagcgtataattgaagagtacggagacaaagagatcgctgatgagcttccctatcttatagtcaatcccagcatagtgctcaagagcgtacgtgccaagatactttaggaggatactacctgctacagtcgtagcgaacttgaggatctgaccacccaggccactatcataagccacccccttatctcggaaggtccaatagcggttgagcgagaagttaacgactgcccccactaccccaccacaagcgagtgcccagaagagctcccagccgaagacctcgacgccaaggatcatcaatccatagtccacgacagagccagctccagcggatatctgggcttgggtaaagttcaggacaagacgtcgaaggcgctgaagcaagggaaaaaatgaccttagttggaagcctgctgctgctcgcgacgaagggcgatatcgcgctcatctgctgcagccaggagcttacggaagtctgagacgaaggagaagaagaggatgatcgagatcacgagaccgaaccactgcatgctcccagggaagaagaattccgaacagaagagcaaagctaagatgatacggacctccgtcggaccgaggatgcccgagtcaatcgaatacttatcggtgaccttatagcggagctgtgagatgatcatctcagcaccgtagaggactacaaagatgaacccaacgaccttccatgcaggctgtacataggcgtaatagcccaagccgatagccacgatacctatccagtcaactacgatatccagacagaagccaaaccacttacggggcttcttacggtagtaagcaagacgcccatcaagggagtctccaaaccagttgatgaaaaaagcgatgggagtaaatagcaggagccaagagccccaaaccgaggctaagcacataagcgccgctacgagtagattgccgcaaaggcccagcgaggtaagcatattggacgtcacccagcgaggcattcgctctacgagataggcgatgagagcaagctcctgatcatgaaggatattcgttcgcttacgatcttggcttatcgcctttttagtttcagacataactctgtattattctattgactgggtcctctgggctcagcctatctaccgttgtcaaatgagggacgggacttccattctataatgtttggaggtcataccacccgagtaccgacggccagtcggtgtccctaccacaaagttaacctatattttcatatagtactccggcttagcatatggtcttgcttatcattttgcacaccaaatcgaaatcacagttcaagcacattcttccctcctctgaatcgaggtggagaataagcatatcacccaggcatatacaaaaaaagaggagctatcgctcctctctctgttgtctcataaggactcgaaccttaacaaacaggaccagaatctgttgtgctaccattacaccatgagacaatactcggtgaaccttggcggactcgaaccgccgacccctaccctgtcaaggtagtgctctaaaccaactgagctaaagattcatgtcgtttttgacactgcaaaggtaggcaaatattccgaaccaccaaacattcggcgaaaaaaatctctctacaccatctattgtatagcgccattatatcagaagcatcatttctatcgggtaacatcattccccttttgagagtcattgaaaagactgtagcttaggatgtagggagagtgaaactatcgtgacagaactaaagcaatagccattcgtccccagacctatagttgtcccgtatgtgaacaactattcgttcgcaggtagaacgagtagtggattaaacccgaaaccaatagtcgtttgtgcatggagcagtagctattttgaaatcgacttagctaatctcatcttcaaatcgctatctaaagagtagcaagtgagaagcaacaaggcacttcaagaagagagagattcctgagcaaagagttagcttcgtgttaatagttgccgactcaatatgatcctgagatcttgagaaagagagcacggcaaagcgctggcagtatgattccaattaccttttattacctctgctcacaagaagtcggtcccgagaccactccaatagtcttaatttactatctctaaactgtaaagcgaatatgaagaagttcatcctcgccgcagcgtgcctcttcgcgctcggtgcaaatatctcggctcagaaccccgaaaagaaggaacccgtaaaaaaggaatgttccaagaacgatgctaagtcctgcgataagaaggacgccaaggataagcagcaggattgctgcaagaagcagaagaagtaatccctcctctaacctatagcaaaggccccgctactcaatgattgagtagcggggcctttgctttttatacagccgtattactaacggcatctatagtgcgtgatcattcatcgacgacgagattatcgatgatgaagttctgacgctcgggagtattcttacccatatagaacataaggaggttgcttaggttatcctccttgcggatacggataggatccagcttgatattctcctcgctgatccaatccttaaactgctctggagagatctctccaagccccttgaatcgcgtgaccagtgctcgcttgccaagtttcttcagtgcagcctgcttctgagcctcattgtagcagtagatgtttgtcacaagttcttcggcaggtgcttcctctgcagtcttcttggtacggcccctcttcttagcaggggcgctcgtcatgaagttatccgacttcttgtgctccttgggtaagaagacgcggaagagcggggtctcgaggatgaagacgtgcccacgacgtaccagctcggggaagaactgcaggaagaaggtaatcagcagtagacggatatgcatcccgtcgtcatcagcatcggtcgcgatgatgatacgattgtagcgtagcccgtcgagaccatcctcgatattgagagcagcctgaaggaggttgaactcttcattctcatacaccaccttcttactctgtccatagcaattaaggggcttacctcggagactgaagacggcctgatacttagggtcacgacatgtggtgatggagccacttgcagagttaccctccgtgatgaagaggctggtacgctcgggctccttggccttagggtcattgaagtgaatcgtacagtcacgaagcttcttattgtgcaggctggccttcttagctcgctcgcgtgcaagctttgccacaccactgagagacttacgctcacgctcactctcctggatcttctgcagcatgatggcagcatcctcggggtggatatggagatagttatccagctccttaccgaggaagtcattgaggaacttctgaatactccgcccatcaggctccatatcctttgacccaagcttcgtcttcgtctggctctcgaagacgggctcctcgatcttaatgctgatggcagctgccatcccatagcgaatgtcacggtagtcgaagttcttcccatagaagtccttgatgacacgagctacggcttccttgaaggccgagaggtgtgtacctccctgtgtagtattctgtccgttgacaaagctatagaagtcctcccctacctgcgaggtatgggtcacgacgatctcgacgtcgtcctccttgaggtggatgatcggatacaagggctcctcggtgatgttctcctcgaggaggtctgctaagccacgcttcgagagatagcgcttgccattatagatgagagcaagacctgcattgaggaaggagtagttcttcaccatcgtctcgacgaactcatccttgtactcgtagtcgcggaagagatcagcatcgggacggaagacgactcgcgtgcccgacggttcatcggagggaacggcctcggtctcctctaaaagcttggcatgggaatagcgaacagtcttcgtcagaccttcacgccagacggtgatctcacagtgaatggagagagcattaacagccttgataccgacaccattaagcccgacagacttcttgaaggccttagaatcaatcttccccccggtgttcatcttgctcgtagcatcgatgagcttaccgagagggataccacgcccgtagtcacgcacagtcacctgaccgtcacggatagtgatctcgaccttcttaccagcacccatgacatactcgtcgatcgagttgtcaaggacttccttcaacaggacatagataccgtcatcggaatgggagccatctccaagcttcccgatatacatccctggacggcgacgaatatgctcgtcccactccagggtcttgatgtcactgtcgttgtagtctactgtcgtctgttctaaaagagtcatgtggttgtaacgtccgtcgttgttttgcaggtcaaagatagcaaaaagcccgcaggaaaccgcctgcgagcctatataataccctctaatatagccctatgtcaacatactctccacgaccttctccataagcctgcccactcagggtaactacgctacgtatagccttggcaggctggtgctacttcgcagacctaccgcacgctctatccgatccttacggacgatatccaggcgaatcccgagcaactcaagcagaacacgggttactaaaccagagtagggcgcacttcgctctctccgacggcctcgccccactcgggcgatccatatagaaggcttcccttgagctcccactgtggagctcgagggcaagcggttctatatcatcttcttgcatgccgatgtgtggttgcctatggaagggagtggtatgaacctatattggtcatcgggctgacctatataggttgctcttccgaccaatataggtcacgacgcgaacctatataggttgactcagtgaccaatataggtcggtagcacctcccctctctcgtatatgctatagtagggtaagactaccctctcttagtgaagcgagatccaaacgactactggtctgtgcacggacgactattggtttgggggtcaaactactattggttcgttatccaaactactattggttcgagcgcggagcactactgatttgagtgcgaacaactattgctctatgcttgacatctctattgcttcgctccttggtcttgaagaagtatggcttgcgccttggtgtgggggcgctacatacccacggcatagatattggatgtatcaccgatattgcttacctttgcaacgctttagagtgcctcctgcaacatagacacactaaaagcttaggtagaatcagtagctcagtcggtagagcacatcccttttaaggatggggtcctgggttcgaaccccagctgattcacagtggggatgtcgcaaggcatccccacactcttttataaagcatacgccccgcaagacctctgtagagatcgtgcggggcgtatgcttcatcggggagggagtatcagtctccggcatgtgaagctcctgtctgtgggacgtacttacgcttgccactatactccgtaatgtcaatacgaatgatctccgtccgatggaaggacttctctacatatgccttccccagctccatatcattaggcgatagcttctctaagagaagatgaagcgcatgccggcgctcctcctcgctgaggtcaatatgtgcagtccctcggaggatgacgctctcatactcggtagtaaacttactcggaaggagattcacgcgcccgacgatacagagggagacctcagcatgaccagcacgtatagcacggagcttctttccctcaggggcacagtggatatagatgcagtctccaccatcccagatatgattgatggggaagccgtagggcttaccctcttcatcgatcatcgagaggacacagtactcgctctcacggagtagctccagagctcgctcttcattaagtaggcgatcacgacgccgtacatcagcattattatacttcatcatcagatatatcactgggcacagattgtaaagacgactggagagtggaggtaccctactctaccctctcagatttgcgaaaaactatctcgacagtatcagctttccttcattctccaagagcaaaccactctgctgtaattgctcaagagcgtaggagaaggcagcatcaacattagctccacggcgagagaatcccatgcgctttgcagcaataagggtcgctgcatcaggggcgatcgacacattctgcttcaccacttcgaggaggacctccatcagttcgaccgaagggatctcttctattgaacgccttgtcaccacggtattggggcggtagcccttccactgcccgcagtcttcctgtgtaagccaaagagtccaaccatcacggtcagagacagcgaagaacatgggcagtagggcatccacgatccccgtaatcgtcgagctaactcgcgcaaaagacttgaaggccgccacacgctttgagaggagcgaataggtaataggctgctctcgggctacgacctcacggacgaagtcctccagcgaagtgctggtatagctatcggtagcggggtactccagcgcctcagaagagcttatcggctcagcgatcagatctgcctcagtgatagcgaagggagaagatactgctgtagactgctgcttcagagggcgctctgagagcgacttcagtcgggcaaggatgcgctctatgacgaggtcaggctggcggaaccagtccggactccatacacgcatgacctcccagtcaaggctcccgagtacgctcggctgcacgacctcacgatctcgagtcgtctgagtacgtcggtaggcttctccatcgatcaagatccctaagcgatagcaatctggtgcactgggcaaggctacagcaagattgaccttgaagttcgagcgtcccagttgagtcatcgcaggatagccagccttctgtaagcgattagctatctgctcggcgatgatacggtcggcagagtccgtatcgggctgagggcgccgtacgagcgtctgtcgctcagcatactcgaggaagtgcttcaagccctctacgcccttagccttcgtgcggcgcagatcgatctgatcactggtcatcgtcgagaagaccagcatttcacagcgagcgcgactgacggctacattgaggcgacgctcaccccctgccttattcaatgggccaaagttcatactgacctgccccgtagtatctgcaccatagccgatagagaagaggatgacatcacgctcatcaccctgcacattctcaaggttcttgatgaagataggctcatagagctggtcagccaactcttgtagcgaggtatcacgagccatacgctcggtcagcgtatcttcaataagattctgctgtgcggcactgaaagccactatacccatactttcccctctcaagctatcatcacgcagacgacggcatatctcatggacgatcgcctctgcttcggccttattctgtcgggtcttccccttgtcataggtccccttaatgtgaatgaatcgcaccttcgtcgcttggtcatccacagaggggaaggtaatgagttccccatcatagtactcatggttactgaaggcgataaggctctcgtggcgggagcggtagtgccaattcagctgtagcgaaggtagactgagagcctggcagtcctgcaggatgctctccaagtcatcgatgctctcctcttcttcctcgacggagttcgtactgaagaagctcgttggaggcatctgcttggggtctcctaccacgatgagggcattccctcgagctatagctcctacagcttcactggtcggcatctgagaggcttcgtcaaagaccactaagtcgtacttctccgcccctaagtctatatactgtgccaccgacatagggctcatcagcatacaagggcagaggcgcggtagaaggttagggatatcatccagcagctggcgaattgaagtacctcgccctccattggctatattacgattgaggcgcccgatctccgagctattatctatgtcctcgtagacatggggaagctgattggacaagcgagcatagagcatcttcttcgacagctcttggaactctgccgtcaactccttgtagcgctgtacctgctgatcaaaaagctcaccctcaaacgtgcagaggagctcactccgagctatcttctgctcggctaaggcacgatagagtcccttgaagaaggcttgcataagctgcgctgcatctactcgcttcgcctccacctcgcgaatgacgatatcaaggccctgcgaagaaagttcgcctcgcaactgtatccagctataccacttcccgaccagcccctgatgagtctgccagcgagagaagcacgaagagagcgcaacagagaaggagctatcggaagggaactgatacgacacccagggctctgcctcctttatatactgcgaccactcaccggagagagcatcgagccctcggagctgatgctttagctcttcagtgaaagcaggcttaatggactctcggatagcggagactgagagctgtagcccctcagcaaaagcctctacagccttcaccaaacgagggaggtaatccaagaggcttcccagctccgaggtcgaaaggctacgtcccaaaagctggtgtatccctccgctctctcccgcacagtgcttaacttccttctgatactcaagcacacgttccagatactctgctactgtctgagcttgcagcttctcactgtagaagcgtatcttcttgaggtagctacgagaggcaaagaagcgaggtaagaaccaagagtcttcaatagccttccactcctgtaggaggctcagtgcatctatctctaagaactcctcacggcagtcagccgtgagcatagcacggagttcatcgcgatgcttcagatgctcccagctcgagcgcaactgggcgatctgatgctcatcaaatgcaatagcgacgacagatgagtgcatcagtggagaggctgagatctctgagaggaggtctataccaagacgtagacttcgctcactatcctccagatctgcgccaaagatctccgtaaggagaatacgcgcacgctgtatgcgtcctgtgagagtcacaccttcgtcaaggagacgtgctaaggtctggggctcttggatgcaggcaagtgtgggccatagtccaaccagaggatgctccgagggctgccctgtgacattgagtactgcgggaagcttgctaccgagtagctcttcgcagtgtgtgataaatcccccatcaagatgtgccagctgctcgttcaatgtgacctcaagaggctctacctcatacgattcatagcgcgatatacattcgtagagggagagcttggctccctctcgatccttatgaaggctctccatatactggatcagcagcgtacgacgctcgtagagcttctgagctatggtgtcatattcctctggctctcggatcttcgccgcatgcagagctttatccagctgctccaagacatgcttctttgtcaccttgttggagtgaagctcaaggcagaagggatcaaggccaatcttctcaagtcggctctgtaccacgctgagagcagccatcttctctgctacgaagagcactcgccgcccctggtaaagtgcgttggcgatgaggttcgtgatcgtctgcgacttccccgtacccggagggccatagaggatgaaggaggagccacgccctgcctccaagacagcagatagctgtgacgagtctacggggacaggtagagcaatgctccctggagtcagatgcttatcctcctctgccaagttcgtctgcagaggctgaggttgccactggagcgaaccactgacgaggctggcgacgacaggatgcgagagaagctcctcacggtgattatgaatatcgtgccacatcaggtacttattgaaggagaatgccccaaggacacactcctcctcgacatcccacttactctgctctcggagagcgtctcggacttgcgcaaagatgagaggcacatcgacaccatgctcatctcggggaaggggatcaatccccttgatacgtatgccgtaggtctggcggatatattcgatgagggtgatattgagtgagatctcctcatctcgcttgcggatatagtagcgcccacgcttgtagatgagatccacgggtaggagaagaagtggagcatagcgtgctcgagggctattcttcttctcataccagcgaaggagaccaatcgccagatagagcggattagcccccgtctcttccctcgtcgtacgagcatgacgatagatattcttgaggatcaactgtgtctcatcctcagcgtagtaggtatgtaagagcttctgcctcgtgatatcatttaggatcagcggctccagagagctaatcatactggagcgaagtaagcgctcttctctatctactcgtacgactccctcaggaataggatggatgcagtactccgtattctcctgcaagtagtcctctatggaagcgacatcgaaggagatgaactgtatggcacggctacggacagagagattgaggaaattgttgcgcagggagaagtccaagagctttcgctcccagatatcaagcttattgacctccgtcttatcgtcataggcacgatccaaatcatatcgagtgcgatgggtagcctcgatggcacaggccgtatgcttaggagcttcctcgggagctagcttccacgtaccgccctcactgaggcgagttggtagcgagataataccctccaagcgacagcgagctatgtctatgaacatctgaaactcattatccctcttgagatgctgccgagcgatctcctgtgcatgctcaaaggaagcatagtccttagtaagctccgtacactcaagtacaagcatctcggagatcccctcagagcagaccttctctaagaaagaagcatcatcacagatgctctgacggtagcacacttcgctgagccacacaccgaggaaggcatgcccacgcatgatcactaccccactattgatcccaaccgcctccagtacagaggccatcaagagggtcagctcaatacagttcccctgatgactctcaaggacctgatccgcgagcgtgatgcgctgcccgatagcctcatagctggcaggcactgcgcggtagataatcccttcttgatggagcgcagcaaagatggcactaacttgctcaacgaccgtattggggtctccatcttgatactcgacaaaggcacttgcccctgtcatccgcatgaggagagctgatgccttgacgaccatccgccctacagcaggctgattgggcaccacaaaagaggccagacactgtggaaggatctgcgtccccagccattgatcaaatgccatcaactccaggtcatactcccgcgaaagcaagacttcttccccgctatagatctgtacagtgaaggaggagatgacacgctctgagagctcaagcaaagcatcagccttggggagaacagcgacatcagagatacgtaccgtgctcccacgatcaatgcggctatatatagcagagcactgctcttggacaaagcgccccccaatagagacactgatatccagcaggtcttcctcaccgacattcgcgagctctatactgctgcagactgggatatggttgtgtaggagtgcgtaattgacattcttgatatagtcaatatgtagctctatcatcatcgtaggggtcgttagtcaggtcgatatgggaaggcaaaagataatgcctctcaccgctataacactcaaaggtagctatatttcagaaggtagctacatagggaaatccccgcctttcctccaagaagaagccttccctcagaagtgcagtagctgagagaaatacctcagcagaaagcactactatgaagtcaggaaagtaaccagtactggtccgagaggtgagcagtactgctccactcgctgaccagtactggtcgatatacccaaccagtactgctcacttcagcgaccagtactggtcgcaaaaggaactagcagagggagggtcatcgcactgcattatactccctatttatccatcagataatcagccagctatctctatagcccacttcatagcagcacctgagaaagaggcctctcccctaccctcggcaaaaaagaagcctccccaccgcttcgtgcaaaagcagtggggaggcttgccttatcagagcatagagctacaaagagctctacgagaagttacttcttcttagcgggaaggtgaatagcaaggcccagagcgtcagcgatagcttcatagagagcttcggagtaggtggggtgcccgtagatcgtagcgatgacttcctcagcggtagcttccatctccataatcagcgaagcctggctgatcatttcagcagccatagcaccgatgatgtggataccaaggatctcaccgtacttgttgtcgaggacaaccttgacgaagccttccgtttcaccagaagcgagtgcacgaccgttagctgcgaaggcgaacttaccgatgcggacatctccgtacttctcacgtgcctggtcttcggtcagaccgaccatagcaacctctgggcgcgtatagactacagaaggagcggagagcatcttgagtgcacgttcgttgccctgcagagcgttctcagcagcgacctcacccatacggaatgccgtgtgagcaagcatcttcagaccgttgacatcaccaggagcatagatgcccttgacgctggtctccatgaacttgtcgaccttgatgcgaccgcgctcgatttcgaattcgatctcaccgaccccttcgaggtcaggcacacgaccgatagagagcagagccttttcagcttcgatagccgtaccatccttgaggatagcagcgagcttgcccgagcggtcttcgatcttttcgatagcagcaccagtcaggatcttgataccacgcttttcgagttcgctacggagcgtcttagaaacttccttatcgagagcagggatgatgtagtcagccatctcgatgatcgtcaccttcgtaccgagggatacgagggcttcagccatttcgacaccgatgacaccaccgccgatgacgacgagactttcgggacgttcttcgaggctgaggatatcgtcactggtcaggactgcaggatgatcaagaccagggataggcagacgacctaccttagagccaccagcgaggatgatcttatcagccttgatgatgtccttgccatcgacgacgacgtccttgtcacggttgatcttaccgacaccgcggaagacttctacaccgttgctcttgagcagcgagtagacaccgcccgtgagcttcttcactacgctgttcttgtaagagacgagcttcttcatatcaacagtgaagctggtgtcagcgaagttgataccacgagctgcagcctgtgctacaccgtcgaggatctcagcattgcggaggaacgtcttggtagggatacagcccttgttgaggcaggtaccaccgaactcagccttctcaacgatagcgacctttgcaccaagctgtgcagcacggatagcagctacgtagccagcagggccaccaccgatgacgcagaggtggtaggagccttcgagatgtaccagaggaagcgcagcaccttcgtgcttaggaccttcctgcttttcaggtacgatctcatccttggtgcggacggtctcaaggctttcgccagcttcaccgatgtaaccaataacttcggcgatgggtaccgtctcaccagcctggtgagtgatcttgaggagcacacccgaagcttcagcttcgagctccatgctcgtcttgtcggtcatgatttcgaggaggacttcaccagcctgtacggggtctccctcgttcttgcgccagctgacgatctcaccttcggtcatatctaagcccgtcttgggcatgatgatctctgttgccatatctatttaggatcttcttttgtagttcgagtggttgatttaaacgaggagagggagtggagactccagggtagccttcagctcctgcatgaacttagctgcaccaagaccgttgatgacacggtggtcactggtcaagctcatcttcatgatggggcggatgacgacctcaccgttgcgtacgacgggcatttccttcgtccctgctatggagaggatagcggagttaggctggttgatgatcgaggtgaaggactcgacaccatacatacccaggttggagatggtgaaggtgctaccttcctgatcctgcggcgtaagcttcttgccaacagcacgctcggtgatgtccttgagacggagcatcaggtctacgaggccaagcttctctgccccatgaacgacaggcaccagaaggccttcatccataccgactgccatagcgaggttcacatagttgtgaagctcgatctgtgagccatcagcagagagagaggcattgatgtaagggtgattcatcagcgtgcgcacgacagcgatggagatgatatccgtgacagtgagcttcttgcccgtcttctccttgataggctcgaggagctgtttgcggagcttcgtagcttcatacatatcgacctcatagttcaggacgaaggtaggagctgagaaatagctatctgccatacgcttagcgatgacacgacgcatcatgttcatcggtacgatctcgacttcacctggagcggcggcgattgcagaggcagcaggtgcaggagcttgagctgaagcagcgggagcggctgccgatgctgcagctggagcggcggcaggagcagcaggcttatcctgcgtgaagggatcgatgatcccctcgaggttggggtaatagcgatctccaaggacagcagctacatcagatcgcgtgatcttccctcggaagcccgtccccttaatcgtagaggtatcgacgccaaaggcatcagcgatcttcttagccagaggagtgataccacctgccttctcgtagctgaactcagctacgtcctcagcgtggatacgccccttgtagccagagcctgcgatcgcattcaggtcgactcccatgcggtgagccaatgagcgagctgcaggtgtggctcttagtttatcatttcccatattcagattattcttatgacgtatagccctcacctgtgattggggtagagggctatacgcggatagtatcttcgtgtacgacgattagcgcttgtcgtagagtcgctcgatatacttcaggatgcgatcaacatcggggagcatagcgacctcgagagagtggttgtaaggcgtagggatatcctcagcggccagacgcaggatgcggctatcgagatagtcgaaggcaccgctctcagcgatagaagctgcgatctcaccgaggaaaccacccgtcttgtgagcatcgttgacgaggagtacacgccccgtcttgcggacagactcgatgatcgtctcacgatccagtggagccagcgtcatgaggtcaaccacttcgacctcgatacccttctcagcagccttgtcagcagccttgaggacacgctccagcatacggccataggtaaccacagtgacatccttaccgacacgcttgatatcagccttgccaataggcaggacaaagtcaggagaggtgggcacctcgcccttcatattgtactgggccttgtactcaaggaagatcacggggttgttatcacgaatagcagccttcagcagccccttgacatctgcaggggtacctggagctacgaccttgagacctgggatgtggcagaaccatgattcaaggctctgagagtgctgagcagcagagcccagacccgagccagcagcgcagcggaagacaacgggcacagaacccttaccaccgtacatatagcgggtcttagcagcctggttcacgatgttgtccatcatgtacacgacgaagtccatgaaggtcacgtcgacgataggacgcatccccgtcagagcagcaccgacagcacaacccgagatagcattctcggagataggcgtgtcacgtacacgctcactgccgaattcctccagcatacctactgaggtaccgaagtcaccaccatagacgccgacatcttcacccataaggaagacgttctcatcgcgacgcatctcttcgctcatcgcttcgatgatggcgtcacgcacggacatcacctttgtttcttgtccttctatcataatagtttattctttttcttagggttagtgaagagcagtggcctattcggtgaagatatcttcgaaggccgactcaggagagggctcgggacccttgcgaccgtactctacggcagcgtcaatggccttgtggcttgcagcttcgatagcatcgagctcctcagccttggcaagcttcttatcaagcaggtagttacggaacttgaggataggatccttcttcttccactcgtctacctcttccttcgtacgatacttaccagggtcagaggtcgagtgaccgtaccagcggtaggagatagcttcgacgaggacaggccccttgccagcgcgtacatccttgatcaccttgtccatcgtctcacgtacagctaagaggtcattaccatcttcgatgaagacgccaggtacaccataggcagcagcacgctcatagacgtgcttcgtacgcatcacagagctgataggcgtagagatgccatagccgttgttgatacaatagaagattacggggagattccagatggctgccatgttcagcgtttcatggaaagatccttcgttggtagcgccgtcaccgaagcaacatacgacgatcttgcccgtgttcttcatcttctgagtgagggctgcaccgatagcgatacccataccgccaccgacgatcccattggcgccgaggttaccagcatcgacatcagcgatgtgcatcgagccgcccttacccttacagacgccgtttgccttacccatgatctcagccatcataccattcaggtcaatgcccatagcgatactctgaccgtggccacggtgattggaggtaatgaggtcgcccttctccagaccagcaatagcaccgacattagcagcttcttcgcccacggagaagtgcgtcataccagggacttccccacgacgcaccagctggttgaccttgttgtcgaagttgcgaatgtcctccatcttgcggtacatctccagcagttcttctttcttgagtttagccataactgtattctatttagatacttatttgatcttctatttctgcaatgcctcggcagatacctccgtcttagcgttcaagaggagcactactacaggctcatgcgtcgtgattcaggagcatctccatgctctaataagggaaaataatccgcattaaccctctgtattgtcatattgactatgcaaagatatgcattacgcataaatcccatcacaccgcagccccttcagacgagttttcaccgctcctcagacccgattttaagagaatttgtatcttattttgagcctaaaatgcggcttttagcaagtcaaccaagaatcagaaaagtgactttcacttagaaaacagcaagagaatcagatggttcactcattagccactcattttaataagcttgagctattccttcatttaccccatcaatagctgctactttaaatagagactgttgacttagagtcctgtcctctttttagagtgctaaggcaccgtgcgcccagctccctgatatacctctccgaagtgatacacaagcccttcgccttatcgcgagtattcctcttatccagcggagggaaaagtatcgttctcgtcaagaaaaaagcgccttcccgcagtggtactcttctatctatgcacgtagtcttaaagaccaggcacataaacccaaatatccacgtacgtagatattagagccacgtacgtagatcaagctcatctgccacgcgtccacaacttttatccctacgcggaggaactacctaatataggtcacttcacaaagctatataggaatcagtccaaaactatatagctttcttcgccatcctatatagctctacccacgtactcaaataggtgctttagcgagaatctcactcctcagagaggcaacatgaatagattcccctaccctatttatctatcttagatatatcaagtagagcatgatgccgctaagggtggatataaaaagccaccgcacacagctgggatagctgcgtgcggtggcacaatgattctttcagatagccgagagcttactctgcttcgtcctgatctgcaaagtccgtgataccggcctcaatgaggatgttgtaccaagtgtaaagcttcttgatgtccgaggtgtagacacgctcgcggtcaaagttaggaatcacttcaccgaacgagttgcgtagcgcatcgctatccttgaggagttcttcagacactgctacaccaacctgcttctcatggagatgcgtgaggacttccgagagagcaatatcttcgccgtcagtgaacatggagatatcaccaagcgataccacacggtccttaggcagaacggggatacgcttctgagtctggagagactcgacgatgagcgtattcttgccggaggagaggagacgatagagtccaggcttgcctgagatagagagaatggtcttcaacatataggatcttatttgagcggaaggctggctgcctcccatgatgggtgcaaaaatagggatatttgagtgaatagccactgagaaagctcagtcgaggagcttatcaaagagactatcaagttggggggggagaggatgagcctcatcattatatatcaggaagtctgcacgctgagctaattcttcctgagacatctgatgctgcatacgagcacggacagcttcctcacttgcgccatcgcgcatcatagctcgctgcaaacgtagcgtatcatccgcaaggacggccaagactccatcggtataggcatcgagtccagcatccagaagcaaggcactctctaaggcacacaggcgtttcccttctgtgctgagcccttcacgccaagcgacaaagtcgcgacgcacagcgggatgcacgagggtattgacttgccccaaaagagagcgatcggcgaagatcagtgatgccagcgccttccgatcaagcaatcccgaaggagcatagatacctgcaccgcaaaggctaatcatcgcttctcggagctctccatcagtatcgtagagggccttagcacggctatcggtatcatagacggggatgccacgctcctcaagtagacgagctatgtaactttttccgctacctatcccccctgtgacccccagcgtgtagatgccatgagaggtacgagctgaatgtagaggactacttgcgctcttcgatgacatactgcacacggtctggagtcaagcgatagtgcttgagccaatcaggcttctgcacaagagtgatggggagctgacgaggagtttccccagaagcattgccagccgtcacgagatcgggataagctacagcgatcttcagctcctcaggcttaatatccttgtagcgagagcgaggtagcgtgagctggatcgtagctactcgaggtaagggcagaagaacgaatccctctggagcacctgtcacctcgacggggagtgtgaaggtctgctccgtaagctgctctacggggacatggacctgcaccacattggtcgaggcatatactccatcgggcaggagaaggcgtaccttcgtcgtcgtcgtcgccttcagcatgtgctcctcgaagggagctgtaagaatcgttgtcaacgtgtctaaggccttccccgaagcaaatacggtgatctccgttggagtaagctcaatatcaccgatggcatagcccgtagcgacctgcggcaaacttcccaacgtgatcggaagcaccttacgatgacgacggtaagccgtcgcattaattgaagcgggcgagatggagatgacacgagctgatgtagcgagtcggctacgcacttctcccgagagggcagaagccgaaagcgagaagcctgcgatgatctgatgatcacgctgcaggcgaaggcggataggagccagtccacgagtcgtatactccaagagatgccccccttcatcctctaagctgacctcaatgtactcaggtagcttcgtctgcatacccacctcaggtgggatggaatcatacaccacggggatatgcagcgtataggtaaagcgacgctgaaggctctgcacgaaccagaaggtagcagagagcaagacaaagacgaggaagataaagagctccctactcctacgacgcttgggcggggaggagttcagctttcgggctgataatgggactctcggaggcgagttcttcagatctaatcgcatagctcgtagacattggtccgcacgatcacacggcggatatgaagagaggctgcccgcacacttgtagcaggcagcctcttgtatttatgagaccgtaggctgtaggctacttggcagctgcctcgggatcccctgcagggaagacagagcccttatcgacacggacacgtactccgtcagcgatctcgacgacaagctcggtctgcttgacatccttgatcaccccgtagaggccaccagaggtcacgatacgatcgttgatgccgagtgcatcgcgcttctgctgcagttccttctgacgcttctgctggggacggatcatgaagagccagaagatcacgaagattgcgaccatcatgatgatagtagagtagccaccgccagcattctgtcctgcggcctggaggagaatcatttccattcgttatgtgtattaagtattgggtgaatattgtacgttactatggaggactatactacttgagtatcttcccctcctccttcaactttcgtgccaaggcatcaagaacgccattgacaaaggaagcactatggttcgtcgagtagtgctttgccaactcgacatactcattgatcgtgatctgagtagggataagagggaaatagaggaactccgtcacggcaagattcagcagaagcgcatcaacatcagccagacgctcactactccatcctgcactcagcacgggctcaatgatcttcatttgatcatcgtacttcagcagagtctgacggaagagcagacgagcaaagcgctcatcatcctcgtccttgaaggccggacggatatcatcgtcgatggccgtatcctcttcgctcttgcgcagagtcttctcgacgaagtccttcacgacttctacaggaccattctccaagcgtgcactctgataagcacccgcctcgcgagcctcattgagggcagcctgtagcgcttcatcttctgtagcgggacgatcttcgacctcagccttctcgacttctctcaagtcatcctgccagtagatcgaatgctgctccagccattcggcgagcatctcatccgtcgtgatgatctgtgtaaagacatcgacccagaaagcacgatcctcttcaaagcctacctcagtagccttgagataatttgcatagatatccgaagcttcgatgcgacggaggaggtggcgcaggagtgcttcatcttcctcccagcggaggctgaagccctcataccacgtattcagcttctctgatgccgcaagcttagcagccaagcgattctccagaaggcgcagattggggctacgctctgccttcgtcgcaagatgcttattcttacggatctcaagcacctcacggtagaactccgtgaaggaagggataagctgtaggaggaagaggtaaaggtcgtacgtacgatggagactgagcaagagatcctgctcagcagcggtcagcttcagctcaccacgatggaggtgagcataagccacctgaagtacacgggtgcgtattagtactctattgatcataatttcaagtcgcttactcctcttctgtggccttactcacatgcccagaggactcagggaagtaggacaaagaacgcacagatactcaagaagtagtacacaaagatacgaggatttcgccaaatagccaccccatacctctgcacaacggctcatacccccacctccactgactaagttttatatgaagtgatatagtgtcgcctttctatgctatagccctcatctaagggatcacttccatcgcatctactctatgggagggaagctacacttactatggaaacaatccatacccacagatgaggatgaaacaaacctatattggtcgctgggtgaacctatattggtcacggcgctgacatatataggttgtcctgacgacctatataggttcacccaacgaccaatataggttgatgaagctcctctaagaggtcgcccttgaggcgatcgttttcgcccaatacctaaacagcaaatagggaggatgaacctcttttggctcatcctccctatcctattctgatgacaatacctacttgcctactactgagtccagactactgggaaatactgctcaaggatctcccgagcagcatccacctcctctggggtaggctcgtggacatgctccaatgggtactcccgtcccagcgtctcatacttatgcttaccataggtatggtagggcaaaagctccagacgctcgatattctcatagctgccgaagcgctctccaagagcatggagcacctcgggctgatcgctatagcctggcacaagcacatagcgcatacgcacgggcttccccatctgtcggagcagctccgccgtagcaaatgtattcgcgttggactgagtcgtcaggcgacgatgcccttcgggtaagacgtgcttgcagtcaagcaagaccatatcgacgatcgagaggagctcgtctacataagcattgcggatgctaccctgagtatcgaggcagatatgtatcccctcttccttgagttggcgacaaagagggatgagcgcctgcgcctgcacagtgggttctcctccgctaaaggtaatccccccacgcttcccgaagaaagggcgctcactaatagcccgtcgtaggacctcagcctcctcaatgagcttcccacccttcccaatagggatggtatcaggattggcacaatagaggcactggaagttgcatccctggaggaataccactaagcgaagccctggaccatcgaaggtccccatagattcaaaggagtggatacgtagcatagcgagctataaaaagagcgggcgaagggtcgacactgatccttcgcccgctactatattaataggtattcggagaactccccgccttagcgcatgcgcttatggaaggagcgcgagatgacctcgagctggtgctcacggctgagcttgacgaagttcacggcatagccagagacacggatcgtcagctgaggatagttctcagggtgtaccatagcatcctcgagcatctcacgattcaggacattcacattgaggtggtgtgcacccttggtgaagtagccgtccatcatcgagatgagattctcattctgctcgctcttgctggagccgagagagtgagggatgatactgaaggtgttactaataccgtcggcagcatcggtgtagtcaagcttagctactgagctgagcgaagcgatagcaccgtggttgtcacgaccgtgcatggggttagcacctggagcgaaggcaacacccttaccacgaccgtcaggcgtagcacccgtcttcttaccgtacatcacgttagaggtgatcgtcaggacagagagcgtaggctcagcgttcttgtacacgggcagctccttgaggaggccagagaagatgtgggtgatatcgtaagcgatcgtatcggcacggtcgtcgtcattaccgtagcaggggaactcaccttcgatcttgaagtcttcggtcaggccctgttcattgcggataggcgtcaccttagcatagcggatagccgagagtgagtctgctgcgatcgagagaccagcgacaccataagcgaggttgatcttaggatcggtatcgatgaatgccatctgtgcagcctcgtagtaatacttgtcgtgcatgtagtggatgatattcatcgagtcgttgtagacgcgagcgatgaccttgaggaccttgaggtagttatcccagacctggttgaagtcgaggacgtcacccttgagttcggggatcccttcgaccatgagtgtaccagagatttcgcagcgaccaccattgacagccaggagcagagccttagcgaggttggtacgtgcaccgaagaactggatctgcttaccgatctcctgataagatacgcagcaagcgataccgtagtcatcagagtgacgggtagagcgcatcaggtcgtcattctcgtactggatagaagacgtatcgatagatacctgagcagcgaactccttgaagccttcggggagcgaggggctccagaggaccgtgaggttaggctcggggcttggaccgaggttgtagagagtctggaggaagcggaagctcgtcttcgtgaccttgtgacgaccgtcaaagaggcgaccaccgatagactcagttacccacgtggggtcaccagcgaagatctcgttgtatgagtccatacgcaggtggcgaaccatacggagcttgatgacgaactggtcgatcagctcctgagcgagttcttcggtcagcgtgccgtggtcgaggtcatactggaggtagatgtcgaggaagcttgatacgttcccgagagacatagcagcaccatcctgatccttgatagcagcgaggtaagcgaagtaaacccactgtacagcttcagctgccgtgtaggcggggcgacgaacatcgaagccatagccagcggccatctctacgatcttcttcagagcacggatctgctcagcgacttcttcgcgcagacggatcgtgtgctcggtcataggaccgtggataccagcgaggtcttccgtcttccaagcgatgagacgatcagccccatagagagccaggcgacggtagtcaccgatgatacggccacgagcatagttgtcaggcagccccgtgaggaagctgttgctacggaaggagcggatctcgtcggtatatacatcgaagacaccatcattgtgggtcttgcggtagtgggtgaagatatcggtaacgcgagggtcaacttcgagaccattctcatggactgccttctcgacgaccttgtacccaccgaagggcttcatggcacgacgaaggacctggtcagtctgcagaccgacgataacttcgttatccttatcaatatagcctggagcgaaggccgtgataccagaaatcgtgctggtatcgatagagcgtacgccatgtggattttcacgctcttccttgagagcctggaggcagtgctcccagacgcgcttggtcttctccgtaggaccggagaggaaggaggagtcaccatcataaggggtgacattctgagaaacgaagtcgcggacgttgagttcgacttcccacacgccagacttaaattggggctgttcttgcataacgctaaagaggttagttaaatgtagtctatactacctatggtgtaggctaaagagagtggtagtgcatcgccttagaccactcatctcatcgctttcggtgcaaagatataataaacattcgaattgcaaactactaagcgcaatattcgcacttagcacactctccgcgcacctgtgcaatctttaacatcctacatcaagcagcacaatcgttcctacatatataatataaggtatagggagggtcccgtcatcacataccacacctaagagaagcagctcccaggaatccactcacctcagcccaaggcccaggctgatgatatccagacctatattatatagggtatcagagatacgtacatacagtgactttcagaagtcacaaaaagaaccagtactggtcagcgaagcgagcagtactggtaacactgcggaccagtactggtaactatcatcaaccagtactggtcggacgagtgaccagtactggttcacatcatccaccgatagaacaatccccgcaaaccctatatacatctcactatcgaagagcataccaatctccctttcactatacgatcaggagacgtagcgacaaattctcccctctcgaaaagaaggccccataattatagtaaagctgaggggggagcagagagcaaagccaagagtttttcttcaagaggatcttctcaaggtgagtacggctttttgcataactttgtagatatgaacttagctcaactacagaccgggcagaaggccgtcatcgtgcgagtcggtggatctggtgctttccgcaagcgcatccttgagatgggtttcgtgcaaggcaaggagatcatggccgtgcacaatgcccccctccgagatcctatatactacaagatcctggactataatgtctcgctccgacactgcgatgcagagcgcattgaggtccgtcttctcgagcctttcgaggagcagactgataccgtcgatgccccgcaagagttacttccagatcccgagctgcatagcctccaccgcatggagctgggacatatcaagacccgcgagctccccaccctacgcatcgccctcctcggcaaccccaactgcgggaagacctccctcttcaaccaagccagtggtgcccacgagcacgtggggaactacagcggtgtaaccatcgaggcaaagagtggatacatatactatggaggctaccgtatcgagctcatcgacctaccaggctcctactccctctccccttatagccccgaagaggtctacatccgtaactatcttacgggtaaggagcgcccagatctggtgctcaacgtcgtagacacctgcaatatcgagcgcaacctctacctcacactccagatcaaggagctcgggctacctgtcgtcgtcgcactgaatatgttcgacgagttcatgcagcgcaaggagtacttcgactaccctcgtctctcgcgccttctcggtgtcccgatgatccctacgatctgtcgcacgggtctggggctggaagctctatttgatgagattattagcttggctaagggactgaaggaaggtgatgagcagctggtcgacatagagacaggtaagctccgccccctacgcatcccctatggctcactcctcgagcctctcatcagcgagctggagaagaagatcagagagcataccgatatcactgatcctatcgtcgcacgctccactgccgtcaagctccttgagcgcgacagcgaggtcgagaagcaactcctctcacgctaccctcgtgggggcttcctcctatccgctcgagactttgccctgcgcaagctccatgagcagacagaggaagaggctgaatccctgatcacagatgcccgctatggcttcatctcgggcgcactcaaggagacctacttccctaagcataccggcaagcgaacactcaccgaccgcattgatgacatcgtcaccagccgtctgtggggcttcccgctcttcctcctactgatggggctgatgttcttcttcaccttcaccctcgggcaatacccgatggatctgattgatgctggggtgaatgcgctcggcgaatgggtcggtggggtgatgagtgaaggcccactacgtgacctcatcgtcgatggcatcattgctggggtcgggggcgtaatcgtcttcctcccgcagatcgtcatcctctacctcttcatttcgctccttgaggatagtgggtacatggcccgcgccgccttcatcatggacaagctcatgcaccgcatgggtctacatggtaagtccttcatcccgctgatcatgggctttggctgtaatgtaccagccgtgatgagtacccgtatgatcgagagtcgcaagagcagactgatcacgatgctcgtcctcccattcatgagttgctcggcacgcctaccagtctatctgctcttagctggcgccttcttccccatcccttggcaggctaccttggtactcttctcgctctacctcatcggtgtactgatggctgtcatatcagcccgactactaaagagcgctgtcttcaagggagaggatatccccttcgtcatggagcttcctccctaccgtcgcccgacagtgcgctcggtagccatccacgtatggatgcgctccaagcagtaccttcagaagatgggtacggtgatcttggcagcctccatcatcgtgtggttcatgagctactatcctcgtcagaatgagctacgcgagcagaaggaccagcaggtcgaaacactcacccagtctaccctccccgaggagatcaagcagtctcgcattgattcacttgagcatagcttcgccacctaccaccaagagcagtctatcatcgggcgtatcgggcacctcagtgaacccgtgatccgccccttgggcttcgactggaagatgggcgtaagcatcgtatcaggcctcatggctaaggaggtcgtcgtcagcacaatgggtgtcatctacacgggtaatggaggggatggcgacgaagctctctctcagctctccacgcgcatgaagcaggaggtccgtgctgatggctcgccctccttcacgcccatcatcgcctacaccttcatgctctttgtcctgctttacttcccttgtatcgcgaccctcatcgcaatcggtcgtgaggctggacattggaagtggggactcttctcggcgctttactcttgcggggtagcgtggctcatctgcttcatcgtctatcagaccgctcacctattaggctaagcaatatccttatgactcaagaaatagctgtactcatcatccttgcgatcgtggtcttcttcatcggacgagcactctatcgcatgcttcgcccgaagaaggagaacgacaataatggcggttgctcgggttgctcgggctgctgccactaactcccctatcttcacgtccacaccactctatcacctctgtatatatgcttgtagatatcctactcttcctacttgggatcatcctgattatagtcggggctaactacctcaccgaaggagcttcgaccttagcacgtcgtatggggctttcgcctctggtcgtgggtctcacgatcgtagccttcggcacctcaacgcctgagcttatcgtcagcctcatgtccgcaatcaagggtaatgctgatatcgctatggggaacgtcgtcggctctaatatcttcaacctcctcgctatcggtggggtgacagcagtagtagctccgatcaccatcacccaaagtaccatccgacgtgagatacctctgatgctcctctccttcttggtgctcttcttcctctcctacgatacgatctttgccggtacgggagcgacggagaacatcctctcacgaggggaagggcttactctgctgggcttcttcctcatcttcctcacctataccttcgccatcgccaaggatagccccaacgatcctcacgcagacaacacgcccctcaagccttaccccatctggcttctcatcgtcttcatcgtcggtgggctcgcagcactggtctatggcggtgacctcttcgtcacctcagcatcaagcattgcacgcaccttcggtatgagtgagagcttcatcggcctgactatcgtagctgctggcacatcactcccagaactggctacgtccgtagcagctgccctcaagaagcagcccgagatagccgtaggaaatatcgtcgggtcaaatatcttcaacgtcttccttatcctcggtgtcagctccagcatcaccccgatccgcatcggtggtgtcacacctctggacttcctcgtcatgatagccgcaggtatcatgctctacatcttcgcagtcctcttcggtcagcgggtagtcaagcgaggcgaaggtgcgatccttgcccttggcttcatagcctacaccgtctacttgatcatgcagctctaatcccctaatcttctggtatacctctacctatggcacagattagcctcagcttttcccccgaggaagaagccctcatcgaccaagagtatcaagccctcatagcggactatatagcatcgcctcaccgacagaagactgagatcatcgaccaggcctttcgcctggctcgtcatgcacacggattggtacgccgacgcagtggtgagccctacatcctccaccccatcgcagtcgctcgtatcgtgtgcaaggagatcggcctcgggtctacctcgatctgctgcgccctcctgcacgatgtcgtagaggataccgagtacaccgtagaggatatccgccgtggcttcggtgataagatcgcacagatcgtcgaaggtcttacgaagatctccaccgagcaggtaccgcagaacatcgatagcctgcaggcgcagaatatccgaaagctcctactgaccatcggtgatgatgcccgtgtgatcctcatcaagatcgccgaccgcctgcacaacatgcgcacgctcggctcgatgaagcccgacaagcagcttaagatcgcaggtgagacctccttcttctacgcaccgctggccgaccgcctcgggctcttctccatcaaaaccgaactggaggacctcagcttccgctacgagcaccctgaggcctacgcagagatcaagcgcaaggtcaaggagagcgaagctggtcgtgaggatctcttccatcgcttcgctgcaccactgaaggcacgctttgactctatgggcctcagctatgagatgaagacacgtgtcaagggatgcttctctatctggcgtaagatgcagattaaggggattccctttgaggaagtctatgacctcttcgccgtgcgtatcatctttgatagtcaagatgggtacccagagaagaatcgttgctgggacatctacacggctattacagagatctaccgcaatcgccccgaccgcctgcgtgactggctctccacacctaaggggaatggctaccaagctctacacctaaccgtgctgggccctgatgcgcagtgggtcgaagtacagatccgtagtcgtcggatggatgagatcgccgagcaggggctcgctgcccactggcgctataagagagacgtagtcgaagaagaccacgagctggagatctggctggataccatccgcgaagtcctcaatcaccccgactcgaaggggatggagttcctcgacacggtacatctcagtctctacgcccacgacatcaccgtcttcacgcctaaggggcgccccatcaccctaccacttgatgcctctgtcctggacttcgcctatgctgtccacaccgatctcggagacacctgtatcggggcgaaggtcaatcacaaggtgctccctctctcctaccgcctctccaatggagatcaagtcgagatcttgacgagtaagatggtacagcccgagcctggatggctcaacttcgtggcgaccgcttatgcgaaggtcaagatcgagacagcacttcgtagacgccaacgcgaagccatcgcacagggtgaagccctcctcacagagcgactcaagagccagggagagcagcttacctcctcgctcctcaaccgcctcacccacctctaccgctacgacaagcctgataccttcctccgacacatcggtgatgggaccttcgagttccccgaagactttgatcgagtcgtccaagggaagacaccaaagagtggcggtaatcgtgtcacgcgtgtcttctcttcgctcttctccagcaaggaacgcgaaggtcagacccttagcggaacgattgtacagcgtcctacaattgataagtctcatccctatgagctcatcgagcaagacggcttactcaactataagatagcaccctgctgccatcccatccctggcgatgacgccctcggtatcatcagcgacgagagtgaagtcatcgtacataaatgctcctgcccagaggcgacacgatacaagacagtgcagggcgaccgcctgctctcggtacactggagcacacatcacactccactcttcgagacgacactcgtcatccgtgggatcgactccaagggactgctcaacgctatatcgcagatcttcttagaagacttcaaggtcagcatcacagctatcgacttgaaggcacacgatggagtgttccaggggacgatctctgtgaaggtattagacacacgccaggtcgaagctatctgccagatcctacgccgcaaccctgctatccacgaggtctaccgcctctcagagctggaagcagggcgtagctaatcaccgccaagtactctccctcatacaaagacagccgccccctcgcacgatgagatgcgagggggcggctgtctttatttcgaattgtatctacgtgtctacgtggactcctagaaccacttaatcttacggaagagatagaaggccaagcctgatatcgtcaccgatacagcgaagatcgcaaggaaggcccagtaccattcgccaaggtagacgttgacgttcatcccgaagaagctcgagatcatcgtcggtaccgtcagcacaatggagatactcgtcatgcgcttcataatcgtattcacattgttggagatgatattggccgaggcatccatcatactcgtgacgatatcggtgtagatattgatcgtattgtaagcctgacgaagctcaatgctcacgtcttcgaagagatctggatcgacgctcgaagcacgtgaggtcgtgcgcagacgcccaagcatagcttcattgcctcgtatagaggtactgaagtaaaccagagatcgctgcagacgcatgatgcggaggaggtcctcattacgaatgctaagctccagctccttctctgcacgattgatctcaagatacatcagcttcaggtacttcaggaaccataccgctgacgagtaaatcatacgtgtgacgaactcggtctggttggcaataccgatattctttcgtcggatatgattgatgaagtcaggtaagagctgtgtacgtctgtagcaaacagagaccgtagcgcgatgccctgtgatgatccccagagggacggtctgataaggcatacctggtccgcctccgtccatcggtatgcggagaatcgttaggagccaatcatcctcgcgctctgcacgtggacgctcatcaatatcggctatgtcggataggaattctcttggtatccccagctccttcgtcaggaacatgaagtcatcttcatcggggcactcgacgtgcacccagcagtggggggcaaactcttccagctcgggtacacccggctcgaaggtgaggtagctcttcattatatcgcttagctgtatatggtgggactattacactccgagcatcccagtgcttacggagtggatactgtcggctcacctcatacagctccctcctcagaggcagggaagtccgtagggcaagacgacggagcgagaggcgcttacacagcgctcattcggcgggagggaatcgtccatctgtcttatcttccttagcggttatacttaacgatgaagctctctatagggggctattcacagctccttcactaaaaagcttcgtgcaaaggtaagaaaaagcgcccagctgaagcgcctgcccagagagaaagcgagggaaacacaccaaaggataagtagctgatgctcaatatagctccacaatccattccccatttgagggctatcgagaggataatcgcttagtaatcagaaggccattgcgcaaggccatatcttcactgcctgcactttcctccttcgaacttctcagcctaaagactccgattttcgagggaagaaggtatgagtaatgaagaggtgaccttgcacaatagtctcatataggtatatgggtgtgtgggtagagctatataggatggcgaagaaagctatatagctttggatcgattcctatatagctttggactgattactatatagctttgcaccgattactatatagctttggactgattactatatagctttgcaccgattactatatagctttgtactgattactatatagctttgagaagtgacctctattaggttattgctccgcgtagggataaaaattgtggacgagtagcagataagtttggactacgtacgtggctctaatatctacgtacgtggatatttggatttatgtacccggcctttaaggctacgtacatagatgcggaaaaagcactacgggaaggcgctttttcttcgcgagaaagacactttaccctccgctggataagaggaatactcgcaataaagcgaagtgctttctgatgtgagcggtactggttcatttatccctccttatacggatcccaatgaatagccattataggaccgcaccttggcacccacaataatctaatttacaaacagataacaagctactccatacgaccatcataggacttctgacattccactcttgttgtgctccccatcaaggctgtagcaggagtaccctatgcaaccccctgcacaaggaagtagtcattaattatgagttagcccctgaaatgtggctttttgtataccttttcttaggaaagaagagcggataggcataggtaatccgagccgtttccgttatctttgtctaagtgacgggggctccctcctctatactgaggcacagattgacctcgttccttctaagcgacactcagtgatcaccctccgagcttgccgtggggcagtagcgaagagcttctctcctgcctcaatgagtatcggagacgactaacaagaaacaactatgcgacctatccattcgaagataaccctcctgctggctgccctcagcctctccctatccgtcccatcgataggagaagcacgtagccgcaagaagcctacgacctctacgagtaagaaggcctcctctaagtcatccaagagtaagagctcggcgaagagcagtcacagctcctcacgtcgcggccgccactcctataatatacgttcgcgcgcacgtggccgctactatgcagcccaagctcccagtgaggagcaacttgagatgatgcgtcaggacagcattcgcctgcgtacgggggggacagcacctgtacagaaggtaagcgaaaagagtgcacagtccaatgagctcttgacgacacgcttccgtcgcgcagactctacgctcagtcgcgcagatatcagagagctatacttctcagtagatggacgtgaagacacagcgcccttcctcagcaagatagaggctgaggccgatcgccttatcgaggggaagaacttcactgaggcactcaagaccgtccaacaagggctgtggcgtacccccacgcatattgggctcatcaagcgcgcctgcgacctctcgcttcacctcaagagctcacgattcaatacctacatgtaccagctcgtcgagcttctcagcatgatcgcccacacgggtgatggctcgagctttgataaggccattcaagtgcgctcacttgacgatgctcttctctttgagcagcattggaatgaaacacctcgcgaggaaatcctcgccagccgtgagcaaacgaacaaaggcaaggactatgtcgttgtagagatacaaggctccgggaagggtaagacacagcaacattactatctgatccagcctaccctgacgcccagcgccaccacaaagaagtagtagcaatagcaaggagatataagcatgtcccaaagctgggagataagacaatataccacagatgaggagacccaagcttgtgaattagccacacgcttggggctcttccctgctatggggcgcctcctggtagcaagaggtatacgtacttatgaggaggcacagagctttttctctccacgccttgaggagctacatgatcccttcgctatggaggatatgctggtcgctgtcgagcggctgaatagagctattgagcagcgggagcatatcttgatctacggagactatgatgtcgatggcaccacagccgtagccctactctaccgctatctgcgagcacaatgcttgcccgaggaatacctccactactatattccagatcgctatgacgatggctatggtatcacgttgcagggcatagactatgcacggcagttaggtgtcagcctcatcatatcggtagacacggggatcaaggcgtttgaggaaatcacctacgctcgagagcatgggatggacttcatcgtctgcgaccaccacacgcccgatgatagccttcctccagctactgctatcctcaacccgaagcgtcacgacaaccactaccccttcaccgagctctcgggctgtggggtagctttcaagcttgtacaagggcttgcctcccatcgaaacctcccttttgaatctctttttcccttgctggagcttctcgtcctaagtatcgctcaggaccgtgtttctatacttggggagaaccgtatcttcatatctcacggcctgcagcagatcaatagccacccctcggtagctatcacctatctcatgcgcttagggaagatccagcctggtcgcgtcgatatggcgagcatctactacgagctcggaccacgtatcaatgccgcagggcgtatggcacacggcgctgagtctgtcaagctcctcattgccgaggatgctgctacagcggaggcacagagccagatactcgacgaatacaatcgccagcgtcaagagctcgatcagcaggtcacacgtgaggccattgccctcgtcgagagtgacccacagctccagaagcagcgactcatcatcctctaccgcccagagtggaacaagggagtcatgggcatcgtagcagcacgactggccgatcgcttccaccgccctgtgctcatcctctcccatagtacaggtgacttcctcgccggatcaggacgctctgcaggaggctttgacttataccaagccatccaagcttgcagtgactgcttggagaacttcggcggacacatctttgccgcagggctgacaatccgtgaggaccgcctccctgagtttatgcgacgcatacaggagtatgctgatagtgtggagcaaatcacctcgcaaccattcactccgaccctccaaatcgatgcagagctcaagccttccgaggtgtcacgcacgctcctccgtcaggtagagatgctctatcccttcggcacggacaacgagcgtcccatcttcatgactcgtaacatgcgagatgccggtggcacacgtgctgtaggcaaggcacttcagcatctgagcctacgtatgaccgacagctatcagcgcatccgtccccttcatggcttcgctctggggctggctcgctatgctcccgagatcacacggcacagcgcctttgccctgtgctttgagcttgaggaaaacaacttctatccgcagagcttcctacagctacgtgtcaaggatctctgccttgagagtgagctgtcagagcgactcacggaccgctagatcacgctggacgccaccatgagaccgacctctaccgaagactttgaggagctcttaggtccagatccaagtgccgatgatccgttcattgagcatcatgaactctggcctgaagacctattcgatgaagatcccctctccatctcccccgtcacacctgggcatgatcctcgaccaggagtagccgacagcgacctctcccccgaagaagtgctggagcgctactggggctactctaccttccgacctctacaaagagagatcgtacaagcagcactagatggacgagacaccttaggacttatgccgactggaggaggaaagagcatcaccttccaagtaccagggctcatactcccagggctgacacttgtcatcacgcccctcatctctctgatgaaggatcaggtagaccacctacgagctcggggaatacgtgctacagcgatccactcgggcatgtcgcaagagaaggtacagacggctctggataattgcctcttcggaaagtacaagttcctctatgtctctcctgagcgtgtaggtagtgagcgcttccaagcgtggcttcatgccctgaccgtatcactcattgtcatcgacgaatgtcactgcgtgtgtcagtgggggtatgacttccgcccctcctaccttgagctaccgaagctccgtgagcagcttcccgaggtacccatcttggctcttacagcgacagcaacaagcgaggtcgtcgaggatatcaagcatgtccttcacttccgcccaggctatgccttctatcagaagagctttcttcgccccaacatctcctattcgatacgtcgtagcgatgacaagcctgcgatgatgcgcttcatactctcccgagtagaaggagctgccatcatctactgccgcaatagacagctctgtcagacggtctccgaagctctccttgccgaaggaattagtgcaacctactatcatgcagggctaacctataccgagcgtgagatgcgccaagggcgatggatgcgaggagaagtgcgtgtcatggtcgcaacgaatgccttcggtatgggcatcgataagcccgatgtgcgcctggtcatccatctcaccatgccctcttccctcgaggaatactatcaggaggcagggcgtgcagggcgtgatggtgagcactcctacgctgtggctatcgtcggtagccaggactccaggatgctacatcggcgcctgcaggataccttccccgagaaggaatacatccgcaaggtatatgatcagatctgcaacttcctcgctatcggagaaggagaggggctggatcgcacgtatgactttgatatcgagctcttcatacgacgcttccatatgcgtcccgtgcagacccgtcacgctatcgagatcatgcagctggcgaagtggctggagtaccacgatgatgacagccgctcaatgctccgcttcctcatcccgagtaaggagctttaccagccccatatcggtcccgaccgcctcatccgcacgatactgcgtagctatacaggactcttctctgactacgtgtccatcagcgagcgcgacctatctaccctctcgggctacagcgaagatgaggtctacacctcccttgtggcactatctcgccaaggcgtcctgcactacatcccgaaaaaggatatcccacgcctacacttcctcatccgacgtgaagacagccagtatctccgtataccctatgccgcctatcaggagcgtcgcgacaagatgagtgaccgcatcggggctgtacgtacctatatagaagaggaagagacctgccgctctcgtatgcttctcgcttactttggagagactgagagtaccccctgtggagcatgtgatgtttgtcttcgcaagcatccttcgggactacatcaatatatcatcgatgccgtaggcgaggagcttgagcgctccttcctcggtaccaccgcagagagctatcccgtcgagaaaatcatcgcagccctcccctaccatcctctagacacgatggctgctatacgctattgggcaggagagctcagcgaagggcttgagatcgatggctctcatctacgacgccaaatgccttagaggctgatggcactatcccccactaagactatcatcattatcaacctatgcttaagattcaccagtttaccttcgggcctgtacaagagaatacctacgtcctctacgatgaagagagccgtgaggctgccatcgttgacccaggctgcatgcgccactctgaggaagagaagctccgtgactttatcacggagcaaggtctgacaccgactctgatgctctgcacccatcagcacttcgatcatgtatggggagccgcatacgtcctcaaggagtggcctcatatcacagcctatgccaacgctattgacttcgagaagctacccctgccctctgagcaactcaagggctatgctattcccctaccactggaagatgtcccagcagaccgctatacgatggtagggcaggatgatctcattcgcctcggcagtgaagagctgcgagttctctttgtccctgggcatgcgccaggtcacctcgcttactatgcacctgagtctggtattctactctctggggacaccctactccaggggacaattggtcgcacggacttctggtatgggagctatgatcagcttgttgagtcaatccgtacccagtatctcccgctacccgatgagacgattgtcttcagcggacacggaccagagactactatcggatacgagcgccgtaagaatcccttcctccaatagttttgcctcccctcccagaggcaacctactcccgagccacagctttgcggctgtctgactacgagttgacgaagcgaattattgtgtatctttggatacccttgtggcaaatacccatggggaataggcacttgatgtaactcgtaactattacatatacccatcaaagatgaagaaacttatcgctatcatggccatcgcagggatgacttcttccctggctctggcacaagcacccactcagtctaaggacgctggacagcctaacgtcttcacgaccgtcaaggacgcacgcatcacctcaatcaaaaatcaggcaaactcaggtacttgctgggcttactcaggccagagcttcctggaagatgagctgatccgcatcggtaagggtgagtatgacctctctgagatgttcgtagtcagccactcctaccgcgacaaggcacgtaagtatgtccgtctgcacggcaagctgaacttcgcacagggtggttctttctacgatgtactctatgtactcaaggagtatggtgccgttccccagtcagtcctccctggtcttaactatgggacaactaagaatcagcacggcgaaatggaagctgccctcaagggcttccttgatgctatcgtcagcaaccctaacggcaagctctccccagcatggtaccctgccttcgagtctatcctcgaccagtatctcggcaagctccccgagagcttcacgtacaatggcaagaagtacacgcctaagagctatgctcaggaaatgggtctgaatgcagacgactacgtttcactgacctccttcactcatcaccccttctacagcaagttcgccctcgaaattgaagacaactggcgttgggctgagtcctataacctccccatcgatgaatttatgcgcaccatggagtatgccatcgataagggctacacgatcgcttggggctctgacgtgagtgaaaagggcttcacccgtgacggtatcgctgtcctccccgacgtggaagaaattgagacgaagggctctgaccaggctcgctggatcggtcttaactcctcagacaagcagcgcctgctgaatcagctcatccacacggctgatgtgcccgaaatcgaacccacccaggaatatcgtcagaagggctttgacaactacgagctcaccgacgaccatggtatggtcatctacggtatcgcaaagaaccagattggccgcaagttctttatggtaaagaactcatggggtgaagctggtgcctacaagggacactggtatgcttcttacaacttcgtaaagggcaagacgatgaacatcgtacttcatcgctcagctattcctgaagacatcgccaagaagctcggcatcaagaccaagtaaaagcttctgatctccaacactaaataggccctcagtatatcctgagggcctatttttttatccatctatcagcaccaagcagatatttcgtctctttcaagaaagttctctcatcagaggaatactctctccaacaatgacatacgaaacaaaggtaaataaagatcaagaaatatttggcagactcaaattatttaacgtatatttgcagtgtgtttttcatggtattagatttaaggttaacgaagggtgttggctgtcgggagacagtcaacactcgttttatagcacctgctcatctggtcagatagcataccgatctcctcctcttcttcctttagaatctgttagataaagagtaactttgtgcaatcctcattaggtgaagtatcgctatgaggccaatgcacaggagtaatcactatggaacagagcaaccaaaacccactgatcgcccgtgtctgcgcagagaagcgacatgagcgagccctgctattagtcacttttgggagtacctatgaagggccatacaaaacctttgcgacattgcgcaatgcctttacagagagtttccccgatagagatatctatatggccttcacctccaagttctgcatccgcaaatggcttgagaaaacaggcgaagaatactataccacagataagtggctcgaagccattggtgaagctggctataaagctgtaagtatccagtctctacacgtcatccctggtctggagtactctttcattgatgaccgctacgttccgcagttccatcgtctctatcctcagataccgactacagtcggcgtacccctactttggagccaagctgatattgagcgtgtcggggactgtatctattcactcttccgcgagcgcttggagcgaggggaagctctcatcctcatgggacatggcaacaatacagataagcatcccgaagccaatggtcgctatcgccgcctacatgactacctgcaggggcgctgctcgcgtatactcatcgggacggtagactttgaagacatgctctttgaggacgtcgctgagcgattagctgaggtatgtccagtgggtacgacgcttaacctcctccccctcatgtctgtagcgggtgaccatgctctcaatgatatggcgggtgacgaagaagaggatacccccctggaagagcaaagctggaagatccgcttcaaggcccttggctacaagatcgaagaagaaaattgccaccttcacggactggcagactatgcctccctccgtcaggtatggcttgatcatctgatggcagcagaacgcgagcagtaattgcgatcggccctacatatccatatatacatcgacaacctcaactatgaataagcgtatctatctactgctcctcatgctcgctttgggactagagccacttggagctatgcacatcatggaaggattcattcccctgaagtggtgcatcatttggtatctcatagctctcccctttgtggtcttcagctatcgctttgtagcccgtcagatcaaggcttctcctcgcatgaagagttccttcgccttggcagctgcttatacgttcattctctcagctctaaagatgccctctgtcgcggggagtagctcacaccttacagggaccacattaggtacgcttacgattggtcccatggcaatgcctttagtcggagctatcgtgcttctcttccaagctctactattggctcatggggggatcagtacactgggggcaaatatcttctccctatctattgcaggcccttttgttgcctacgcactctatcgccttctaacctctgctcgcttaccaaagagtctggtcatcttcatcgcaaccttctgcggatcgatggcaacctatatcgtcacctctttccagcttgctgttgtctaccccgatactgtcacaggcgttatgggagctgcatggaagttcctcggaatcttcgctatcacacaggtgccactctctattattgaaggtatcttgaccgtcattgtactccgcctccttgaaaagagccaagcaaaaacggctaccagcgcgaaagcatccagcacgcagtcctcgacaaagagcagcctacgcccacaattcatttggctctcaattctcgctgtagtctgccttgcattacccatcttagctggcctcttcgacatcggagcaggcacagacgaccaagccggaaaaatgattgggcaattgactcctggcttcaatccaactccattccttgagagcttcgagccttcagagtttgcagagcctcttctcttcgcactgcaggtagctattggtattgctctattcgcctggggatactaccagctcatttataagagacatcaatccaagcagaaggagcaagaagcctaatgtcccacacgaagcactgctctcgacgccctacgctccgtgaggagcagggatacttattcttgtgtctacttctccttggggtagcacttgtactgcaacatacagctcacctcctcatacttgcagctgctatcattggcttgacttttgctcgaagcacgggaaaaagatggcttttgacacgcagactcctcatcctctcattcttcattctcctctcaattctaccgattgccttaggccgtggagaagagagttctctatggatagacttcggaggctggggtgtcacgaaggagggaagtgtacaggctctcaagacggggcttcgctgcttagcctccgcctcctcgatgatgctcctcctacagcttcttccgctccatcgactctacacagtgctacgcagccttggtactcccaagctcttcattgagctcattgagctcacctaccgctatatcttcgtcctggaggaaacagcggggcagattcgcctggcacagacgagccgtctgggttaccaagggagcttgagcgagaagctccagcacttcggcatgctcctctcgcgtacttttatattgagtcaagtggaatcagacaaactttaccttgggctccaatctcgaggatacgaagatgaggggctaagaagtagctcacacaacagcactgagagtatgaatcattttcctctactgcaagtcaaagagctatccttccactatgaagatggatatgaggctctccgcggtgtcacctgcaccatacagagaggagagcgcatagctctcatcggtcataatggcgcagggaagtctaccctcttccttctactctcaggactccaaccctcatggagcggagaagtctatctccatgggcaactaattcatccacaagagcgagtcgcgctaaggcaacaagtagcactcgtactacaaaactccaattaccagctcttcactccctctgtcgaggatgagatcgccttcgggcttaagaatatgggtctgcgtgaggaagccctccataagcgacttgaggaactcttgactcgctacaaccttgccgagctccgccacaagcctccccatgaactgagcgaaggccaaaagaagtgggtagctcttgtatctgtcctcgctaccgatcctgaggttctaatcctggacgaacctacggcggcacttgacgcgttgtacacggagcgtgtgttggacttactggagcagctacatcttgcagggaagaccatcatcatctccacccacgatatggaactggccagccgcttcgccgatcgagtattactgatggaggcaggcaaactgatttgtgatcgcaaggctcctgatctttggtccgatagtatcctgctaaaggataagcaccttccacaaccctgggcatggcgaactcgtacgcatcagcaggcgccttcccacccaatccgtacggagctacagcagtatcacctcccgctcttcctatcatcggagactctccccatactcctcgtcggaggaggaaagggaatttggcgcaaagcccaaggacttattgagcgtcgcatcccattcaaagttatggcaccagctctctgtgatgagctcacagaagcagcacgacaaggtgactttgagtggattcctcgtgcttacacagggatctccgatgtaggcgaagcacgtatcatcatcttaggaataggagacggtggtgaggagcttcgctttgctcaagagcttgaggctgcaggctacctcttctccctgctcagcgatgcaacacgagggaacttacagtttggcgctaccgcacacaaggaaggcattaccctatcagtgcacagcgactaccgcctccccgagatcacacagcagctcaagacggcatggagtgaaacacttcccgatggcttcgaagcacgtctacgagccctctcgcaatatcgtcaagcactacaagaggctaccgatgaggctgagcgtactcgtctgcgtcaggcctacgacaaactaaaagaatcactactacaggatacgatccatgatcggactcattagtatcaaccataagacagcctccctatcgagacgtgagcagttcgccctcggagaggaagaagctgtccaacttatctcacagtggcaaggggagcaaggtctacttggtggctttgtcctctctacttgcaaccgcttggagatctattacgaggctcccagccaagtaactcaagagcttgagtctacactcatccgcagcctctatcgcttcaagcgcatacgtcactctggggacgaatcgatcttcacgacgctacatcacacagaggccatacgccacctcttccgcttggcttgtgggctggagtcaatggtccttggagaaacccaaatcctcggacagctgaaggaagcctatcgtcgtgctacgactcacgagcagagtacagccgtgatctctcgcctctgtcatcgagccttcgagactgctaagaaggtacgcagtgagtacctactctcagggacaccgatctctgcagggacagcagccgtagactacctacgacagcgtataactaacttctccgagcagcccgtactcattctcggagcgggacagatggcagaagtcattgcccaccgcctacaggagctccagcatcctatggtgagcatctacaatcgtacccgcgagcgagccatggcctttgctgagaaacatcagatctcctcggtgtactcggatgatcatcttcctcaggcgctcacgacctctcctatcaccttcgtcgctacctcttctcttactccgattatcacggaggagctccttgtacatataccacaaggggagcgctacttcttcgacatggccgtgccacgcaatgtcgatccatcgctggacgaagtaccttacctccatctctatacgatcgatgatctgaggagtcagcagtatctctcgggcgaagagattcatcagcatgaggagatacgtagctacatccagtcgatggtacaggacttcctccaatggtgtgatgcggcggaggtgagacaaacgatcggtctcatccagcaggtatcccatcagcttctcgacaaggagctctctgcccttcctcacgacttaagcgaagaggaacgtaagctcatctcgcactgggacgaacatctacgcaccacttacacgactgcgatcgtctctgcactgcgagagctgagcgagacgacagggcttaagacctactccaagacactcctccagctcttcacccatatacaaggcaagctcccatcacatgactcctaagaccttcatcctcgggacgcgaggaagccagctcgcgctgcgccagagcgagatggtacgcgatgccctcctccagcactttcctacccttcagatcgagctcaagatcatcaagactaagggggacaagctccagcatctctccctggatgcctcgggagacaagggactcttcacgggagctcttgaggaagcactgcgagctggagagatagacttcgccgtgcacagcctcaaggaccttcccgttgatcctgctcctggcacccgcatagcagcttatctgccccgtgccgtcacgcacgacaccctcataggtccgatgcctctcgaggctttgcctgaaggtgctctcatcgggacatcaagtcggcgccgcgcctatcagatagctctccactatcctcatctgcgcaccgagcccatccgagggaatgtagagactcgcatgggaaaggtcgacgctggactcttcgatgccaccctcctcgcagaagctggtctcactcgtctggatatgaaggacgtcacccgctatcccatcagtgaagagatcatcgtacctgctcctgggcaggcagctattgccgtccagacgcgagacgaagatggtgagctgcagaccctacttcagcagatccatgacgcgaagactgagcgagaggttaacattgagcgaagcctcctcaagcgcttaggtggcggctgtgccctccccttgggctgcgtctgccatatcgagggcgagatggcagagcttcgtgtattctatgcgaacgcttcggggacggagcactatctggctacgcaccgcaccccactctctgatattgacaccctactctcgcagctcatcgagcgccttcagcatatcaccacagcatgagtaccgtatatctcgtcggagctggtcctggtgaccccaagctccttacccgtcgtgcctacgaactgatcacctcagcggagatcgtcgtctatgacgctctcgtctctccccgcattatcgagctcatccccccgactacccgcctctacaatgtagggaagcgctatggcgcacactctatgaagcagcccgagatcaatgcgctgctcgtcgagctggcttctaaaggggcgggcaagatcgtacgtctcaagggcggtgacccctttgtctttgctcacggaggagaggagatgaacgtgctccgcgaagctggtatccgctatgagattgtgccagggatcacggcagggcttgctgctcccgcctacttcgatattcccgtgacgcaccgagctgtcagtcgttcgttcacttgccttactgcccactcggagtcaggagagctccctgccttcgactggcaagctcttgccaagctcggcggtacgctgatcttctacatgggtgttcgccaaatctcttcgattagccaagctctcatcgaggcgggatgctccgcagcgaccccagcagctttggttagccgagggacgaccccacagcaggcactcttagcacgcaccctcggggagttcactgatcccgaagaagacttcacggcctatacgcccgccctcttcgtcattggtgaggtgattcgtctgagtgaaggtcgcacgtcacgccccttggctgggaagaaggtcatcgtcacgcgagcccgccatcaagcctcctcactgcaggaagccctcgaaagtgaaggcgccgaggcactccttctcccgaccatcgaactatcatccaacgaagccatcaacgcagaagtcgccacgcacctcagtcagctggcgcgctacggctgggtcttcttcacctcgcccaatgccgtggagttcttcttcgcagcactgcaccgagctggacttgatgcccgtgcgctctcaccctgccgtattgcgtcgctgggaccgatgaccacggcagcgctcgaagctcaaggaatcaagcccgacttcatgcccagcgagtaccacgctaaggccttcgcccgcgaatttgtggagcaagtctctgccccccacgataagcccctgcttctaccagcttcggcactggcgcatgacgaccatgctcacctccttcaggaagcaggctaccgctgcgagcgacttccgctctacaccaatagcccaattcattacgaagcggaggagcttcgggcgacgctggcatcagctgactacctgacggcatgcagctcatcggcgatccatcaccttgtagagctactggagcaatatcagctgaccgacctgctacgtgagcttcccatcgcagttcttggagagcaaacggcaggtgccgtacgaagctacggccttgagccccagctcatcgcaccgcaggcgaccatcccatcgctcgtcggagctctcatagagcgcctcggctaaggcattcttcattatccatcaccaagtagtagcggggtgtagggcataaggtcctgcgccccgctttcgtatgccgtggagtgcctttctgtaggaagccgtagcaaacatatagggaggagagaagaaggtatatacctcaccatcgcgaggaatataccttactgccgtgaggaatataccttaccgccgtgaggaacataccttaccgccgtgaggaacatacctttctgccgtgaggaatataccttaccgccgtgaggaatataccttaccgccgtgaggaatataccttactgccgcgaggaatatacctttctatcgtagggtatataccttttgctcgaaaggtatatactattcagccgaagggtatatactatttgctccaagggtatatactatttgaccgaagggtatataccttttcattccacctcaataaagccaaggacgagaggtcgggaagctaccgcaagcccctcaggagatttgcgccgccagtagcggacaatattgtcttaaaacggggggaaaagagtatatttgtacgtgagcaagccaaggatttcgccctcgatgacgcgacgagctaccactgagatgccgacccgctaagcaccgctcatacgctgggcatagagccacagcgcaagctgacaacaaacaatacagcaaatacacatacaatggaacaagtcgatgtgctcctcgggctgcagtggggcgatgaaggcaaagggaagatcgtcgatgtactgacgccctcctatgatattattgcacgcttccaaggcggtcccaacgcggggcatacgctggaattcgaaggagaaaagtacatccttcgctccatcccctcaggtatcttccagggcgacaagatcaacgtcatcggtaatggtgtggtccttgaccccatcctctttgctgaagaagctcgcgcactctcccgtagcggacacgatctgcgtaagcgcctcgtcatctctcgcaaggcacacctgatcctccccacgcaccgtatgatcgatgctgcacaagaggcagccaagggcggtgctaagatcgggacgacagggaagggtattggccctacctatacggataaggtcagccgcacagggctgcgcgtcggggacattcactccgacttcctccgcaagtaccaagaggcgaaggatcgtcacctgacccttctccgcgcttatcagcaccccacggagggcctcgaagctctcgaagctcagtggatggatgcgatcaagtacctcgaagagttcaccttcattgatagcgaagagtatatcaacgatgcacttcgctcctcacgccgcgtcttagcagagggtgcacaaggctcgctcttagatatcgacttcggctcctatcccttcgtcacctcgagcaacacagtctgcgcaggctgctgcacgggtctcggcatcgctcctcgacagatcggcgaggtctacgggatcttcaaagcttactgcacccgtgtcggtgcgggtcccttccctacggagctctttgacgaaacgggtgagcagctctgctcgctgggtcatgagttcggctctgtgacaggtcgccgccgccgctgcggttggctcgacctcgtagctctgcgctatacggtgatgctcaatggtgtcacccgcctgatcataatgaagagcgacgtcctcgatagcttcgccacgatccgcgtctgcacagactacgagatcgatggtaagaagacgcgcaacttcccctatgagcttaccgacgcggtacgccctgtctacgccgagctcaagggttggcagtgcgacacgaccaagctcacctctgcagcggagttccctcaggagctcaaggactacatagccttcgtagagcgtgagatcggtgtacccatcacgatcatctccgttgggccagatagagatcagacgattaccctccatcctgagctcctgccccagatacactgaatagacttcaatgacctatcaagaagctattgagtatctctatgcggctacgcccgtcttccagcaggtaggcaccacggcatacaagcctggcttagagacaacacataccctggacacacactacggccatccccaccgttgctaccacacgatacatgtcggtggcacgaatggtaaggggtcgacctcccacacgatagcagccgtcttacaggcctctggctatcgtgtggggctcttcacatccccccacctcttagacttccgtgagcgcatccgagtgaatggagagatggtgagcgaagacttcgtttgtcgcttcgtagaggacgctaagcccctcatcgaagagcgctcgccctctttcttcgagatcacgacgctcatggctttcgactacttccgccaagcgcaggtagactttgctgtcatcgaggttgggctgggaggacgacttgactgcaccaacatcatctcccccattgtctccgtcatcaccagtatcagcaaggatcatacccagctactcggagatacgctcgaggcaatagctcgggagaaagcgggtatcatcaagcctcatacgcctgtcatcatcgggcgaggcgaatcccctgaagtgcgcgaggtcttcgtgaagaaggcagccgaagaggaggctcccatcatcttcgccgaagaagccgtacacatcaaggcacagactcccgagttccctggccagagctttacactcgagggaaaggaagctctcccctactacttcggcttaggtggactcgtacagcgggataacttccgagctatctacgctacgatccaagagctacgtaggcaaggaatcaccatctccgaggaagcattccgtgatgggctacgtgatgtcgtttcgctcacagggctgcgcggacgctgggaagtactatctcagcaccccacactcatctgcgacacggcacacaacgaagatggcgtccgctatatcgtagaccaactccgtagcctacagcgtcctctgcacatcatcttcggcatggttaatgacaaagatatccgcggagtactacaacgtctaccgaaagaagcacgttattacttcaccgcagcctccgtaccacgtgccctctcaccagaggagttacaagctctcgctgagcagtatggactacaaggtgccacttatccgaacgtccacgaggcgctcatcgctgctcgcaaggcggcaaccccagatacagatgtcctcttcgtcggagggagcaacttcctcatctccgatctcttggcggacctctctaacacagatatcaactaactaataattctatcgatatggaacaagcaaagctgtcactgcgtgacaagccagccgcccgctggggtgcgctggcactcctctcgctgacgatgttcttcgcctacatgttcgtagacgtactctctcctgtgaagacgctcgttgagaccgagctcggctgggactctactgtcttcggactctatggtgggagtgaattcttcctcaacgtcttcgtcggcttcctcatcctcgcaggtatcatcctcgacaaaatgggggtacgcttcacggcgctactatcgggtagtcttatggtcattggggcccttatcaaagtctatgccctgagtgcgaccttccgcaatggtggtcctggctacgatgctatcaatagcttcagcagcttcatccatggtatcacgggatggaatctccctcccacagctctctgtgcctgcctcggattcatgctcttcggctgtggtaccgagatggctggtgtgacggtatcacgagctatcgtcaagtggttcaagggtaaggaaatggcactggctatgggcattgagatggcactggctcgcttcggtgtcttcgctatcttccgcctctctccttggctcgctaaggagtttgagtcagtacaagctcctgtcatattctgtgctctacttctttgtatcgggctaatgctgtatgtcgtctactactttatggacaaggcactggataaggacctcgaaggcgaagaagaagaggcagaagagcccttcaagttctccgacctcggcaaggtcttcggaagtggtgtcttctgggtcgtcgctatcctctgtgtgctctactattcagcgatcttccccttccagaagttcgcgaccgagatgcttcactacaaggtcggctttgaaacgacagaggctgctgcttacttcagctacttccccattggtgcgatgatcgtcacgcctatccttggcttctaccttgaccgcaagggtaagggggctacgatgcttatcctcggatcaattcttatgatcatctgccacctgatctttgctctctatcccttcgtgcctggtagcaccaatagcaccatcgttgcaatgagtgcgattgtcctccttgggatctccttctcactcgtacctgctacgctgtggccctctgtacccaaactcattgacaataaggtattgggctctgcctattcagctatcttctggatccagaacgttggtctgatgtctgtgcctatcatcatcggtagcatccttgactcagtcaataaagatgtgcccgaaggtcaacccaaggactatacgcttgccatgcttgtcttcgccagcttcggtgtcatagccctgctgatgagcctcctcctcaaggctatcgacaagaagaagcagtacggtctcgagctgcccaatgtgaagtagtaatcgcccccttcatcctaatgcatcgcgaggtgccgctcccttggctggggcggcacctcgctgcttttagatacacaagcccttcgccttatcgcaaatactcctcttattcagcggagggaaaagtgccattatcgtgaagggaaaagcaccttcacgtagtggttttcctctgtctatgtacgtagtcttaaagaccaggcacgcaaatccaaatatccacgtacgtagatattagagccacatacgtagcccaaacttatctgccactcgtccacaacttttatccatacgcgaagcaacaacccaatataggccatttcacaaagctatataggaatcagtccaaagctatatagctttcttctccatcctatatagctctacccacgcatccatatacctatatatgaatcagtacaggttcattttccatcctcctttggctttctacttttagagcaagacaggaaaaccgctccaaggtactcacagctggcactcgatactgctttacaccgaatagcctcgagtaagtaaatcgaaatgagcgaggtgcaagactacagcaatagtcattccctctaaaagcagtagttgttccgagtacgaaccaatagtcgttcataccccgaacgagtagtcgtttgccctcgtagcaatagtggttcgagcagagagcagtagtcgtttacgaagtgactatccacaaagcactatgataatgggacgacatactacaaggacagcatcatgagagaagctataagaagccttatctccacgaagctcatacctcggcatcttagctttttaccgtatctttgtgcacattgtgtaagcctcaccgaggcacaagagacaacgataatatatggcagtcgaaataagacagattacggaaaaggcagacttgcggaagttcgtcaagttcaacctcaagctctacaagggcaatccgtatcacgtacctgggctcatcgaggacgaactcctcacgctggatccagcacgcaaccccgcctttaagttctgcgaagccgcatacttcctcgcctaccgtgatgggcgtatcgtcgggcgtatcgcagggatcatcaatcaccgcgccaacgagacgtggaaccaaaacaacgtacgctttggcttcgtcgacttcatcaatgacaatgaagtcgtcgatgcactcttcaaggctgttgccgactggggtaaggcccgcggcaaggatatgctccaggggcccatgggcttctctgaccttgaccacgaagggatgcttatcgagggcttcgaccagctcggcacgatggctacgatctacaactatgcctactaccccaagcatatgcagcgtatgggctttgtcaaggatcaggactggcaggagtataagattatgatccccgaggagatccccgagaagcacaagcgtatcgccgagatcgtccgcaagaagtacgggctcaagacactgaagttcaagaatcagcaggagatcctcccctatgcacaccgtatcttcgacacgctgaaccaagcctactcagtcctctacggggtctctgagctatcacgtgagcagatcgactactacgtgcgtatgtacatccccatgctacgctacgactttgtgactgtcatcgtccgcgaggaagatgataaggtcattggcttcggcatcacgctgcccaacctcagccgtgcgctacagaaagctaagggaagcctcttccccttcggatggatccacctactgaaggcgctgaagatgaagaaccccatcgtcgacctctacctcgtcggggtcatcccagagtatcagaacaagggtgtcaatgcacttctcttcgacgacctcatccctgtcttccagaagaacggcgtacgctatgccgagagcaatccagagctcgagaccaacgctgctgtacagatgcagtggaactacttcgagcgtaagcaccacaagacccgtcgtgcctggatcaaagaaatataagagatatgcttgttgaattactgaagtccaagattcaccgcgtcacagtcaccgaagctaacctctcttacatcgggagtatcactatcgacaccgacctcatcgaggccgcgaatatcctcccaggagagaaggtacagatcgtcaataataacaatggggctcgcctcgagacctacgtcatcgctggagagcgaggatcaggtgtcatctgcctcaacggagctgcagcccgtctggtgcagcctggcgataccgtgatcatcatggcctatgcttggatgacctacgaagaagcacagggcttcaagcccgcagttatcttccccgataccgcaaccaatagactcgtatagatatgttcgaaaacctgagtgagcgcctcgagcggtcgtttaagatcctcaagggcgaaggtaagatcaccgaactcaatgtagctgagacgctcaaggatgtgcgccgagcactcctcgaagcggacgtcaactataacgtagctaagaaattcaccgaagacgtcaaggagaaggccttaggtcaggatgtcctcaccgcagtccgcccaggcgaactgatggtgaagatcgtccacgatgagctggcgaacctcatgggaggtaaggctgcagagctgaacctcacgggcatgcccgccatcatccttatgtcgggtcttcagggctctgggaagacgaccttctccgggaagctggctaacctcctcaagaccaagcaaggcaagaaacctatgctcgtagctggtgacgtctatcgtcccgctgctatcgagcagcttcgcgtgctggcaggtcagctcgatgtccccgtattctttgacctcgacagcaaggatcccgtgagcatcgctcgccatggtgtcgctgaagctatggggcagggctgcgatgtcgtgatcatcgacaccgctggtcgtctggcagtcgacgaagagatgatgcgtgagatcgaagagatcaagcgtgctatccgcccctcagagacgctcttcgtggtcgactcgatgacgggtcaggatgctgtgaatacagctaagaccttcaacgagcgtcttgacttcgacggcgtcgtcctcactaagcttgacggggatacccgcggtggtgctgccctctccatccgtaccgtcgtcgataagccgattaagttcgtcgggatgggcgagaagatggatgcactggatgtcttccaccccgatcgtatggccgaccgtatcctcggtatgggtgatatcgtctcacttgtcgagcgtgcccagcagctctacgatgaacgtgaagccaagcgcctcgaggagcgtatcgctaaggatcagttcgacttcaatgacttcctcgcccagatccagcagatcaagaagatgggtaacatcaaggatcttgcagcgatgatccctggtgtcgggaaggcgctcaaggatatcgatatcaaggacgatgccttcaagagcatcgaagctatcatctactcgatgacgcccgaggagcgagctaagcctcatatcctcgatggtcatcgccgtaagcgcattgctctcgggagtgggacgagcgtacaggatgtcaataagctcctcacgcagttcacccagacccgcaagatgatgaagactctgcagggcttcaagggcggtaagatgcccaagatgccgaagatgccattcatgggtggtggtaagctccgctaatccctccccatactctgcctcataaagaagaggcctatatgagatcatcccttggataatcatcatcctcgcttcactacgatagcgtccatgatccttatccaagggatgaactctttctcccctactctacttattatacgtacgatatgaagctaacaaagctaccattggtcgctgctctatcgctcctcatgctctcgagcaatgcatgggcgcagagcactaagcgactcatcgatgaagtcaatcccttcatcgggacctctaacttcggtacgactaaccctggagccgtcgtacccaatggcttgatgagcatcacgccattcaatgtatcgggctcccccgagctgaataagttcgataaggacaagcgatggtggagtacaccctacaccgctgacaacaagttcttctcgggcttcagccatgtcaatctgagcggtgtcggctgccctgagctggggagtatcatcgtatcggcttctgcgggcgatctcgatgtagactatacgcactacggctcagccatgagcgaagagaaggcacaccctggctactacagcgtacggctcgataagcacaagatcaaggctgaggtgacggctactcagcgtacagccgtctcagctttcacctttgagcgcggtggtaagagtaatatcctcgtaaaccttggtctgggtctgacgaatgagagtggtgcgaccgtgcgcttcctcaatgactcgaccatcgtagggagcaagctcatgggaaccttctgctacgctcctcaggcagtcttcaatcagtacttcgctatccgcatcagccgtcgcgctccagcctcgggctactggaagaagcagcctcctatggaaggcgtagaagcagaatgggacaaggatcagggcaagtacaagatctaccctacctaccgcaaggagatcagtggcaatgatatcggagtatggttctcctacgacaccaagcctggtgagacgatctacgtccagacgggtgtatccttcgtcagcgaagagaatgccctgctgaaccttactactgagcagcctaagctggactttgctgctgttcgtcgtgcagcagaagatagctgggagaaggcactgcgtgtcgtcgaggtcgaaggtggtacgactgaccagcgtaagatcttctacacggcactctatcatctcttgatccaccccaacatcctacaggacgtcaacggtcagtatcctatgatgggatcactccagaccgctacgacgaagcacgacagatataccgtctattcgctgtgggatacctaccgcaatgtccacccactcctctcgatcctatatccacgcaagcagctggctatggtagagacgatgctggatatgtataaggaaggtggctggctccccaagtgggaactctacggacaggagaccttcaccatggaaggagatccctcgatcatcgtcatcaatgacacgtggcagcgtggtatccgtgacttcgacacgaagctcgcttacgaagcgatgctcaagggtgctacgacgcctggtaaggacaataagctccgccctgacttcgatgactacgcttcacgtggctacgtccccttaagagagaagttcgacaactccgtctctcacgcgctggagtactacatcgccgactggaatctcagccaatttgccagtgctatgggcaagaagaaggatgcacagctcttcgctcgccgagcttctggctacaagcactactatgacaaggagacggggctgcttcgtcctatcctccccgatgggaagttcctcacgcccttccaccccaccctcggccgcgacttcgagcctaaccctggcttccacgaagggaactcctggaactatagcttctacgtcccccacgatatccgtggtctcgcaaagctcatgggaggtgaacgcaagttcgtcgacaagctccagagcgtcttcgataaggagaactacgatccagctaatgagcccgacatcgcttatccctacctcttcacctacttccccaaggaagcatggcgcacacagcgtatcacgcgcaagctcctcgggctgtattatcgcaacgaacccagtggtatcccaggcaatgatgatacgggtgcgatgagcgcatgggctatcttctcgatgcttggcttctatcccgactgccctggatcgatgagctacgggcttactacgcctacttttgacaaggtcaccatacaccttgacacgaagtactacaagaatcctacgctggtcatcgagacgcgtcctgtagacgaacataccaatcgtcagcgcatctatttcgacgagttccagataggtaacaagctctataagaacacctaccgaatcaatcacgacgagctgataaatgctggcaagatcaccttcttcacgaagcttgtagggggtactccagagattacggtggattaatcagagtgagggtatcaaatatttttgcaggaaaggccgtagagcctttgtataagcaaaaaaatctgtacatttggaacagaatcaaacgggagctacggcacacattcccacaaggataatactccaggagctcccttcggatacgaattaactttgtacaacccatacaacagaacttatgaacaagacagaatttatcgcacgcgtagctgaagtagctgacctcacgaaggtagatgctcgcaaggccgtcgaagctttcgcttccattgtagcagaagaactcaagaagggtgagaagatcacgctcctcggcttcggtaccttctctgtaaatgaaaagcctgctcgtcagggtatcaatcctcagacgaagaagaagatccagatccctgctcgcaaggctgtgaagttcaaggctggtgcagctctcgacctcaacgtagctcctgctaagaagggcaagaagtaagcagcacgacacgtgtttcattaatggcgtgaggccactccatcgacttggtggggtggccttgctcttttcattcccccaccctcacagctatccgatgatcaagcttactacaagcggcgaagagagccgcctcacactccacgaaggcagcgaagagcttggccacatttcctttcgtgtgcttcccgagacttccattgctgtggccaaacacacgcgtgtttcgcccgagcatcaaggcaaaggcatcgccgcaaaattagccgcaagcttcttcgagcactgccaaagcgaaggccttcttgttcgtcccgtctgctcctacatagtggcttatatggagcgtcaccctgagctcgaggtgcttcgtgctccagaggaagcgtagccttcaagtacaagcgacaagaagtatctctacttctccgcagaagttatattacttctaactgaatgttatattactttcagccgaatgttatattacttctgaccgaatgttatattacttttcatcagaagtaatataacatctgaacaaagggtatatacccttcaagcaaatagtatatacccttcgagcaaaaggtatataccctacgaccgaaaggtatattcctcacgaccgaaaggtatataccttcttacgacaagctattgaacttcgtccgtgcgctacgaaaggtcgccttccaaagcagccgatgcgtcaccctaaaaacagtcccggccctgcggtaaatactaccgcagggccgggacttattccgtcgaagagacgggagaatgcttacttcgtgcgaaggaggaagctcagctcgatatcatcgttgatgaagttgtcgccgagaccggtgaagaagctcttcgagccatacttgacattccagtcagcacgattgatgttgaagggcttgctcgcgatggcgtaggtgccgtgctcctgatcatagacgacagaggcgacggggatggtgatattcttagtgacgtccttcagcgtgagattccccttgagctccgtgaggtccgtgatgcggacgccttcggcggggatattcgtcagctcaaactttacttcggggtacttagcagcttcgaagaagtcttcgctcagaaggtgagccttgagcttatcaccgccttcctcgggcttgagatcctctacagtgaggctgtcaaggcgaagagcgacgtagccaccacgaaggataccttcgcgaagatcaagctgccccgagctaacagggagcttgccgtagtgcgaacccgttggcttaaagcccttccactgaacttcagaggcggcgaaatcaatctgtacaccctgtgtgctatcaatagcagaggcagccacagagtcagaagccgctacactgctctgcccattcgagcccgagcaggaggcaataaaggagcccgcagcaagaagtcccgccagagcccaagtcattttcttcatatataatcggatcaataattagggattgttatcaagtaaaccgcgaagtaataaaaattgttcacggctcctatttggaaagctctgcgaagtccaggcagctcccaagcgaatagcctccatataaggggggtagaacgaagcgtacataatgatacctccgatcaataccccttaaatcgctgattgtcgggacgttcgtggagacgataggcaagtgttcctgcaaaacgaagcgttacatttgggtt

SEQ ID NO: 69 - DNA, 322622 bp, Porphyromonas bobii
  source 1..322622: mol_type = genomic DNA
ggtcgcagccgctgctcttttatatactattatagtacgacgtctatcgcttgggggcgaaggccacgaggcgctcggcctcgtcgacgatgcggtcagcagcctcggtgagggcgagcttgcggatctcttcggagagcgaagcgcactgcgcagcgtcctgcacgagggcgatggcgcggggcgtcagttcttcgcgagccttgtcgtcggggatgaggagcgcggccgagcgcgtcgagagcgccagcgcgttcttcgtctgatggtcttcggctacgttgggcgaagggacgaggatggtaggcttgccgaggaagcacagctcggagatcgagctggcaccagcacgcgacaccacgacgtctgccacagcataagccagatccatacgctggatgaaggccgacgagtagacggggaagtcatacgccttgagtagctcctgcgccttggcttcgaagcccttacccgtctgccagatgagggcgacacccgactgagcccactcctcgaggcgcgaaccgatgctctcgttgatactcagagcaccgagactcccgccgatgacgacgacgacgcgcttcgtatcagctggcaagccgaagtgacgtagcgcttcttcgcgcagcccgtcctgcatatattcgatagcaggacgcaggggattccccgtcagtacgatcttatccttcgggaagaagcgctccatctcggggtacgctacgcagatgcggtcggcacgacgagcgaggaacttattcgtcacgccagcataagagttctgctcctgaatgagcgtggggatgccgagactctgtgcagccttcagcgtaggtgcgctggcatagcccccgacgccgatgacgatctcggggcggaagtcacggatgatatcgcgtgccgtgatgagcgcacgcaggaagtcacggatgactccgatattgcgccaagggcgcttgcggtcaaggccgcggatcttcagaccgcggatggggaagcccgcctggggtacacgctccatctccatgcgcccttcggcaccgatgaagaggatatcgatctcggggtagcgccggcgaagggcttcggcgatggatacggcagggaagatatgcccccctgtgccaccgccgctgatgatagctcgctggatcatatttctatacgtagtcttgtgtgtcggtatcgagaagaggctcttccacgacctcctcggtcgcggcgacctcagtgaactctgcctcctccgtgtggggctcacgcttgggcttgtcgacgcgcgaggccccgatcatgatgccgaaggccatgcttgtcgccaggatcgacgaccccccgtagctgatgagcgggagcgtctgccctgtggtgatgatccccgaggcgacgatcatattcaccagcgcctgcagcggatagaggatgccaaagcccttgatgaggttgctgcggaagacgttcgtctgcttgcgtgcctcacgatagccgatgagcatccacaccagatagagcgatgggatgaagagcagaccgaggatgccatactcctcgatgatgatggcgtagaggtagtcggagtaggcctgcgagagggagtcacgcagcttgctattccctgggccacgaccgacgagcttggagttggcgatagccatacggcccatctgctcctgacggttctcgtcggtgatagcgaagcggtcttctcgctccttgacggcgccatgcagacggttgtgccacgtgacggcacgaccaggcagcatgctctcgggggctaagtagaggtaggcaccacccaagaccaccgctatggcaccgatagccgtgatgcggtacatgaagcgcttaggcgccttgagtacccacgagtagaggtagaggaaagagaagatgatgaggaaggtcgacaggttgctcaagagcaccataatcgagaggatgaagatccacccccagtaggcccagtagcgaggctccttcctcgggtcttccacgacatccttacccgcgacataagcgccccagatgacgatatagacacgcaggaattcggcgggctggatggtgatgaagcccaagtcgatccagcgctctgccccattggtgctctgccctaagaggagctgcgcgaagaagagccccaccatgaggagcgccgagagcggtggcagggtatagcgatagaagcgcccggagcatcggctcagcaagatagccgagcagataccgatagcgagcatgagcgcatgcttgaggatgggattcagtcgcccgacggagaggctcttatagatctccgagctcagcgcgctcgatacggtgtagagcgagaccaagacgagcacgaagtagagtgcccacatgaggccgttgcccgcgaagatgcggcgcagccacgagtccttcggctggagggaggtcgtctgatcgttaggcatgcttctcctcagcttggatcaggccctgtaccacttcgcggaagcggtcgcctcgatggatgtagctggtgaagaggtcgaagctcgcacaggctggagagagcaggacggtgtcgcctggctgagccatctcacgagcgtgggcgatagcctcctccatagagagtgccgaggcgatctgaggcaccttgccgtggaagctcttgtacagcttcagcacgtcggtcgtgagaaagacgagcccacgcgccccagaggtgatgagctcggtgatatccatatagtcattccccttgtcttcgccaccgaggatgagcacgtagggcgtggtcatcgtccgcagagcatagtaggtagagctgacgttggtggccttggagtcgttgatatagcgcacgccatcgagtaccccgaccttctcaaggcggtggggcacgttcacgaagtcgctgagcgcacgtctcaggacgtcatgcgagacaccgaggcgcagggctgcgatcgaggcagccatagcattctgcaggttgtgcggcccctggagtgcgagctgatcgatggggaactcaaagctcttcccgtcgaagtgcaggcgcatcatgttgtcgtccgacttgtcggcggcggagcctacctgcggataggtcaggaaggagagcgtctgcatcggcatgggctggtggctcatgacgtagcgagagacgaactcatcttcaccccaatagatgaaggcatcctccgcggtctggttctgcaggatgcgcatcttcgccatagcatactcctcgaagttgtagtgatagcggtcgaggtggtcgggcgtgatgttcatcaagagggcgatatgcacgcggaacttgtacatatcatccagctggaagctactcagctcgacgacgaagtagtcgggctgctcgtcggggatcacctgacgggcgaggctgaagccgacgttcccagccagtgcgggcttcatacccgcctcggtgaggatgtggtgcagccacatcgtcgtcgtggtcttcccattgctccccgtgataccgatgaccttgcccttgaggtagcgacctgccagctcgatctcggagatgacggggatgccacgctcacggatagccaccatgataggcgccttctcagggataccagggctcttgacgatctcctcggcacgcaggatgagctcggtggtgtggctaccctcttcgtaggggatgccattggcttcgagctcctgcttgtacttcggggcaatatgcccgtagtcggagaccatgacggatataccacgactctggtataatagggctgcgccgacaccgctttcgccagcgcccaggacgacggcctggaacttctcttctatcatcttatttgtcttgctatggggtgcaatgggaggtagggcaaaggacctcttcaccctacctcgcatagcctgcttttagactacaattttcgtcattttcgcccatatatgcaagctgtatgcgtgcgcactcgcgcggggaaggagcgctacaccgttgcacggagggggcaaatagtcgctttttctcccccaccttcccctcgatgcgaagaaaggaaaagctttacctgccccatgcgacatttagacgagcacaaagtatcacatatatcccctacctttacacccataagtacagccccagatacatcagcaagacagcatgcagccgcacgagtggacgaccaatgacttcaagggagatcctggcatagactactgccatgacaagttcctctttgcacatagcctacacacgctccccgagcggatgataggggctcgtatgcacttcggcatggcgatctactgccgtcagggtacgatacagatcgccattgacggccgacagtaccgcctcgagcaggggcagaggcttagctaccaagagggctctctcatcgaggaatgcctcgcctcgagcgatgccgatctggtcctcatgggactctcatgggagctcatcggggcgaccgaagcactgaataccgtggtatggagcatcgcggactatgtgcgcaggtcgcccatctacacgctgagcgaggatgcgatagagctcagcaagatctaccaccagcagatccacaccctctgccactcggccaatcccctcttccgtgacgaactcctgcacatccatatccaggcactcctctactccttcatccgtgaggtcagcgaagagctccgccaagcgaccccgcaagacctgacccgtgccagccagcaggcacgtctcttcttcgacctgctgggcatgcaacgcggccgcatacgctccgtctcggaggttgctaccctgatgaacctcacgccgaagtacctctcacgcatcatcaaggagcagacgggagagacacccatccacttcatccatcagtacatgatgcgcgccatcacgcaggagctacgctactcaagcaagacagctaaggagattgccttccagcagggcttctcgagccttgccttcttcggcaagttcgtcaagcagcagacgggcctcacacccaccgagtaccgcaagaagctccaggcaggcgaaggcgcgacaccgagctaagccacgacacacccgctcgcctcagcccagcaaccctcttccccgccatagtccgagcccctcgcctatcgcggggatttttctcatccagcggaaggaaaagcctcatcctccacgaaaagaaagccccttcctctacgccatttcctctgtccacgcacgtagtcctaaggactcggcacgtaatctctatgatccacgtacgtagattttagagccacgcacgtagacaaagcttttctactactcgtccgcgacttttccccgcactcggatgaagttatccagctactcgtcaccctttttcctcccctaaaatccaagggaaaacttattacctttgagtcatctaacacttacagctactctatggacctctttactctcggagaatacacgatcaaagctacccaacaagtcggacgccaattcaagatgctcacccatccgatcccctcggccgttagagcgttctctatcttactcttcttcagccttctcttccctaaagaaggaaatgctcagaggcaagtcgcagacttacgtgacctccatcgggtatcaggagagaatcgaggtgatccccaaggcttctactttcaagatcgaaactacgacctcgataagtttgctggcgagtgggagggtactggctttggtggctatcagtggcgtacccgtatcgctgtccaaaagaaggtagaccgccacggctcctattggtccgatgtccttggcttagagctatcaatcaagaaggatggcaaggcagctatcacgccaaccagagatctaatccctgggacctcttttattcaaggatttgggcttcgatgggtgaagcagcagcaggctgtagatcctaacatttataaagtcctcttcgcttacggtatatctgatgagccttaccgagggacagtcgaagtgcttctctatatcaatgcgacccatgacacgatcgtgatacgtcggggatatactatcgagatagagcacagtgcgaacatccctgattatatcccccctgggggctatctgtctgaggtctgtacgctacgacgcgtgaagaagtaggggaagttcccctgcatgatacaccaactcgtcacccgaactactcaccgaataaacccgcccctttttactatgaccaagctaattaggctcttatccctcatactactcctctcgggagcgagggtctctgctcagacgcaagtcgcagccttacgcgactaccaccaagtaacagaaaacaattactacaattctcgaggctactactttgaggaccaacaccacgacctcgacaagttcgtaggtgagtgggagggcattggctttggggactatcattggcacataggtatcgtagagcaaaagaagtcagacttcttcggctcctattgggctgatactttgggcttagagctatcagtcacgaaggatggcaaggctgctatcacaccgaccggaaatctaatacctgggacttccttcattcaaggcgctcgatttctatgggatagggataaaaaatcagtagatcccgatatctatacgatgctcttctcttatggggaggcagatcacccctataaggcagcagtacaagtgcgtctctatataagtgctgatcaaaatacgatcgtgctacgtcggggagctgttattgcgattgatgaaattccgaatatccctgattatatccctcccggggagggctatctggcagatgtctgtacgctacgacgcgtagggagataggagattacatcacacaaacaacatacgctctatacctatgctccgattcatcacctctaccattaggctcgccttactcttacttcctgccttactcgtcctttcggaggtctcccatgctcagacgcaagtcgtggacttacgtgacttcatgcgcgtgtcggacaacaaccgtggcaaccctgaaggctactactttgaggacagacaccacgacctcgataagtttgctggagagtgggaaggcacgggctttgttggccaccagtggcgtgcccgtatcatcgtgcagaaaaaggcaaactattacgattcctactggtacgatgctcttggcttagagctatcaatcacaaagaatgggaaagcatgtatcaccccgacggactccttcctgcctgggacctcctttattcaaggcgggggatttatctgggacagagagaagaggtctctacaattagatgtttacagaatgcctttcttctatggcaaagctgacaagccctatcaggagcttgccaatgtacttctctgcttgaatgcggcacacgatacgatagtagtacgccgaagccacttggtcggaatcgatcgtcctgtgatcatacctgattatctatcggtcccgtatgacgctgaggtctgcacgctacgacgcgtgaagaagtaggggaagctccttatacagcctcgggtaaagcatacggaagcccaccttgacacggggactacctcaatcgaaatagcaggagaaggcaatcgccttctcctgtcttgtctctggcactttcccccgctgatgggcaagaggatatgcagaggtcgcgatgagcaagaggagtagacgtgcagacgatgcggcgtatagacgccaacggcacgggaggatttcgatgcgtaagccctgcccacgaggtcagcgcccccagaggcacgggggcttttccttatctttgtaacctaacagctatttaatcgtataggaagaaaacctactttttactcgacatgcagcgcttgaacttccgccccatgctcatcgatagcctcaagggctacacgcggcagggcctcactcgtgacctcttagcggggctcatcgtggggatcgtcgccctacctatggccatcgcattcgctatcgccagcggggtatctcccgaagtggggcttgtcaccgccgtcctcggggggctcatcgtctcggctctcgggggtagctccgtacagatcggggggccgacgggcgccttcatcatcatcgtcctcggcatcatcggcgagtacggtcagggcggactactcatcgccacactgatggcggggatcctcctcctgctgatgggcgcactgaagctcggatcgctcatcaagttcatcccctatccgattatcttaggcttcacggctggtatcgctgtgaccatcttcaccacgcaggtcaatgacctcctcggccttgggctgacgggtctaccgaaggagtttgtaccgaagtggggcgtcctcctctcctcgctcggctccgtccacctacctacgctcgccatcggtctggggagcatcctcctcatccagctcaccccacggctgacgaaggtcgtccctggctccctcgtcgccatcatcgtgatgaccatcgtctgctacctcctcaaggagtatgctggcgtcacgggccttgacaccatcggcgaccgctatacgatctcctcgaagatccccgacctcgtcgtgcccgagctgagctgggcgacgatgcagcacctcatcggccccgccttcaccatcgccctcctcggcgctatcgagtccctcctctctgccagcgtcgctgacggggtcatcggtgagcgccaccgctcgaataccgagctgatggcccagggggtagccaatatcatcgttcccttcttcggtgggatccccgtcacgggagctatcgcccgcacgatgaccaacatcaacaacggcgcccgcacgcccatcgcaggcatcacgcacgctctggtcctcctactgatcttcctcttcctcatgcccctgatggcctacatccctatggcctgcctctcgggtgtgctcgtcgtcatctcgtacaacatgagcggatggcgctcggtacgcgcttcgctgcgtggcccgaagagcgatatcgccgtgcttgccgtcaccttcttcctcacggtactcttcgacctcaccatagctattgagctgggtctcctactctccatgctcctcttcatgcgccgcatcatcgagtccacacgcatcgtcgtctcccgcgacaagctccacgtgcacagctccgaggatgacggccagctcgcaggtcgtgaggaagccctcgacctgccgaagggcgtcgaggtctacgagatcgaagggcccttcttcttcggtatcgccaaccgcttcgaggagatcgtcctcgccaccaaggcgcgcccgaaggtgcgcatcctgcgtatgcgtcaggtgccctttatggactcgacggccgtgcgcaacctccgcattctcatcgagacctcacaggctgagggcatccagctcgtcctctcgggcgtgcgccccagcgtccatgagaccctgcgtgccacaggtatcgccgacctcatcggcgatacctacatctgccccaatatccacgaggccctcacgacggcctcccaatacatagcccagataagcgaatgaaaataggtacggtcgatctcggggagcgccccctactactggcccccatggaggatgtgacggatgccgccttccgtctcctctgtcgccgcttcggtgcagacatggtctacaccgagttcctcagtgctgacgccctcatccgtcaggtcgctggcacgacgcgcaagctcgagattagcgccgaagagcgccccgtagccatccagatctacggccgcaaggtcgagcctatggtcgaagccgcccgtatcgccgaggccgctggccccgaggtgctggacttgaacttcggttgccccgtcaagcgtgtcgctggcaagggcgctggtagcggtatgcttcgctgccccgacgtcatgctccgcatcgtcagcgagatcgtcaaggccgtgaagatccccgtcaccgtgaagacccgcctcggctgggacaacgatagtaagatcatcgtcgagctcgccgaagccctccaggacgtgggcatccaagccctcaccatccacggccgtacccgcgcccagatgtacaccggctctgccgactggacgctcatcggcaaggtgaaggagaacccgcgcatgcacatccctatcatcggcaatggtgacatcaccacgggcgaagaggccaagcgtgccttcgacacctacggcgtcgatgccgtgatggtcgggcgtgctaccatcggccagccctggatcttcgaggagatgaagcactacctccagacgggcgagcctgctccccgccacccgaaggccttctacgtcgacgtacttcgccagctcgtcgacaacaacatccgcaagctcgacgagcgccgtggcatcctccacagccgtcgccatatagccgccagcccgatcttcaagggtatcgataacttccgccccgtacgcatcgctatgctcaaggctgccacacgcgaagagctcttcgccgaggtcgcccgcgctgaggagatgctcctcgccaccggcgagcactgggacgcccccgcactctaatagccccatctatcacatacctcacacggcagacaatgaataagacgaagctccgcctctccctccttctcctcggctccctctctctcggctcctgctccaagagcggaggcaatgagttcaccgccgaaggcaccatcaccgatgccgcaggcaagacgctctacctcgagacgaccgacaccgacgaacctcagctcatcgactccgtgaccctcgacgagaagggtcgcttccgcttccgtcgcgaggcacatagctatcccgccttctaccgcctgcgcctcggggagagcttcatccccttcgcagccgactccgtcacgcacctcaccctctccgcctcgggcaaggatctcttctcgacctacaagatcgagtcgggcgacgaggccaataaacagatccgtgagatcggtcagctgcgcaccgccaccgacaaggctatcgaggcgatcctcacacagctcaataatggcaccctcgaccgtggcatcgctctggcacgtatcgactcactctccacgcagctgaagaataccctcacgagcaagtacatcttcagcgaccccaagggcgctgccgcctactacgccctcttccagagctacctcggcgggacgtacttctccatcgaccatcctggcgatgaccgcgccttcgctgctgtcgccacggcctacgatgccttccaccccaatgccccctacacgccgctcctgaagcaggcggctctgcgctccatcgctatggcgcgtgctcgtcagcgcgaggcccatcccgacacgacgatgacggcagcccccgtggaggtcgtcgccttccccgagatccgcctgcgtgaccagaaggggcagatgcgctccctcactgctgaggtcgctaagggccaccccgtcctcgtctgcttcaccgcctacgctggcgactggtctcccgccctcgtcgccgagctgcgcgccctgcagtccgcccaccccgacctcatcatcttcgaagtctccgaagaccaagacgcctatctgtggaagaatgcttcacgcgctctgccctggatctgcgtccaagacctcaaccataccgcagctcaggactacaatacccagagcctgccttccttctatgctatccgcggtagcgagctgaagcgcctcgctgagcccgccgatatcttccgctaatccgacatcccactccgtatgagtaagcattcagtagcccactaccagcggctcaatggccgacgctccttcccctcgccccaccgcagtcgtggccgaggcacgcgcgtcttcgtcatcctgatcctcatcgtcgtagccgcagcagccctcgcgggtggctatctctatactacgcctgcaggtcgccccgccaccgacacgacctacctcctcgtagccccagggagcaactatgccgagttacgtgagcagatgcagaagaagctctggctgcgcttcccccgtgtcttcgaccgtctggcggcagtgcaggggcttagcgagacgggcgacgccctgcgcccaggtcgctatgccgtcctccgctccacgacgatgcaggagctcatcaccctcctcaaggaagggaaggacagcccacttaagctcacccctccctccgtacgcaaggactctgagctcgtggacttcctcgcccagcacctctgggtgaaggccgacacgctccgcacgctcctcgctgactcagcccttatggcgcagtatggcacgaagcctggagccttctactccaaggtcatccgcgagccccacaccctacgttgggctgcctcagggcgcgaagtcctcgacagcctccaagcccactaccagctcttctggaagggtaagcgcaccgaagaggctgagcgccttgggctgaatcccctcgaggtgacgacacttgcctctatcgtcgagagcgaatcaggcaagcgcgacgagtaccgccgtatcgctgggctctatctcaaccgcctgcgcaaggagatgcgcctgcagtctgaccccacggtcaagtacgccctcggcaacttcgatctcaagcgcatccgtggcgagcacctcatggtgaactccccctacaacacttacaaggtcacgggccttcccccgacgcctatcatccagccccgcacgagcaccatcgacagcgttctcgctgccgagagccacgactacctctatatgtgtgctaaggaggacttctcaggctaccacaacttcgcctcctccttcgccgtgcatatgctgaatgctaagcgctaccagcaagccctcaacgaccgaggcatccaatgaaccagccccagcaacagactcctcccgaggcgtggaccgagcgtacccgcctcctcttcggtgacgatcgcgtgagcgagctcgcccagtgccacgtcctcatcgtcggtctcggcggtgtcggtggcttcgctgccgagctcatcgcccgcgcaggcatcggtcgtatgaccatcgtcgacgccgacatcgtgcagccctcgaacatcaaccgccagctcgtagccaccaacgagaccatcggcaaggcgaaagccagcgttctggctgcacgccttcgcgccatcaaccctcacatccagctggaggtcatcgaggccttcctcaaggatgagaacatgatcgagctcctcgaccgtcaccgctacgactacgtcatcgacgccatcgactcgctgagcccgaaggtgcacctcatcgccaagtccatagagcgcggcctgccgatcatcagctctatgggtgcaggcgccaagagcgacccgacgcagatccaccaggccgacctgaataagagctacaactgtacgctggcacgtgccctgcgcaagcgcctgcgtaagttcggcatccacaagggactccccgtggtcttctccgcggagctaccggactccgacgccgtcaaggagatcgagggcgagcagtgcaagcgctctaccgctggcactgtctcctatatgcccgcgctcttcggctgtcatctggcggcctacgtcatccagcatatccagcatcaccccaccactgagcctaccagcctatgatcatcgaggctacccatatacataagagcttcggctctcttgaggtcctcaagggtatcgacctcaccgtcgcaccccgagagatcatctccatcgtcggagccagcggtgcagggaagacgaccctactccagatcctcggcacactcgaagcccctgccgaaggtgcttcgctgaagatctgcggggaggaagtcacccgcctcagcgcccgccgtcaagccgagctccgcaatcgtcagataggcttcatctttcaggcgcaccagctcctgccggagttcactgcactggagaacgttatgctccccgccctcatcgctggagagtcccgctcgaaggtacgtgagcgcgcccttggactccttgagcgtctcggccttgcggagcgtgcctcgcacaagcctgccgagctatcgggcggtgagagccagcgtgtcgccgtagcccgcgccctcatcaattcgcctgcggtcatcttcgccgacgaaccatcagggagccttgacacggcgaataagcagagccttcaccagctcttcttcgatctgcgtgacgaactcggccagaccttcgtcatcgtcacccacgaccccgactttgccgcccaagccgaccgcatgatcgtgctgcgtgacggccgtatcgaggccatacacacccgcaccgaagcccccaccgaggagcacgtcggctaagccaccccagcgatgcgtcagaggaagaccaccacgagccgcagtgagcgcctattcttgctcatcctctcgctcatcaccctctcggggctggcactctacgccttcgccccgcacagctcgcctgccccacagcctatgcaggcgaccgaagcgagaagcacctccgaaagcaacgctcccaaaggacagcagccccaccgcgatagcctcatacgtgacccgcactatgtcggcccgccagcaggagctgcagcgcgtggggagaagttcgcccactacgtcagccttgacctcaaccgcattgactcgctgacgctcctgcgtgtcccgggcatcggccccgcctatgcccatcgcatcctcgctctacgcgagcgcctcggtggctactacaccgtcttacagctacaggaggtctacggtatggatgaggataagttcctcgccctgcgcccatggttcgtcatcaagacgcccccgaagcgcttcgccctcccccagctccgtgccgactccctcccctggcatccctacctctcccgagagcagagtgccaccctgcgcaagctcatcctacgccacggcaagcaccttagctgggcagtcctacgctctgcggggcctttctcccgcgaggatagcatccgcctcagcccctacttcgtagatggcacggcagcacacgccacagatagtattcctaatcaaccataagccctatgtatccaatcagtcgtctgcgtcgcctacgcatgactcccaacctccgtgcgctcgttcgtgagaccgctcttgagcccgctgacttcatcgctcccctcttcgtcgtccacggcagtggcatccgcgaggagatcaagaccatgcctgggcagtaccgcctctcggtcgatgagctcgtcaaggagtgcgaaggcctctacagtgtaggcgtactctcggtgatgctcttcggtatccccgagcacaaggaccacaccggtagcgaagcctattcacacaacggcatcgtacagcagggtatccgcgccctcaaggccgctctgcccgacctcatcgtcatcgcagatatctgcatgtgcgagtacaccgaccacggccactgcggtatcctccacgaccactataccgtggacaatgatgccacgctcccctatctctgccgtcaggcggtctccttcgccgaggcaggtgccgacatcgtcgcgccctccgatatgatggacggccgtatcgccgccatgcgtcaggccctcgacgaagctggctacgagcagctccccatcatgtcgtacgctgcgaagttcagctccgccttctatggccccttccgtgatgctgccgactccgcccccagcttcggtgaccgccgtagctaccagatggatcctgcgaacatccgtgaggccatgcgtgagatcgaaggcgatatcgccgaaggtgctgacatcgtcatggtcaagcccgccctgccctacctcgacgtcattcgctgggcacgcgaccgctacgacctgcccttggccgcctatcaggtcagtggcgaatatgccatgatccaggctgctggtctcaatggctggatcgaccgcgagcgtattatgatggagagcctgctctcgatcaagcgcgctggtgccgacctcatcctcacctacttcgcacgcgaagccgctgagcttcttcgccgctaagagccgatcgctatggcctaccgtcgccccctgaccccgacgcagatggtcgtcatcaccatcctctggctggcgctggtcatctggatcatctcctctggcctgcgcctcgatggcttgacgatcctcatgctcgccttctcgggcgtcacggtcttctaccccatcatcaagagctggcgcgagcgcaagaagaagtaagcccagccccacaaagcgcagcccgcccccgtccacttatgttggacgggggcgggctgctttatatctgatgcgaagtgctacctacgggcgaggtcgtcgtgcgtcagctggaggagcgcacggccaagggcggtgcggtactccgagggcgcgggagtcacctcgatgccacggccgctgacattgtccatcaccgtgacgcccgtgctgtcgacaaagccgaagccatcattgaacgtgtagtaggcgaagggatgggtatagttcggcgcaaggacattgcgggcgaaggtgaacgagcggtagctgagtccgagctgcgccaggagcgtcgccgagaggtcggactgcgtcatcagcgcatcgacgacacggggcgagcgcacggcaccaccgatccagagcagcgggatgtggtgcacagccgtgctattgcggtcgtccgagccgagctccgaatagccgtgatctgctacacaaatgatgaggaggtccttccactgcggggtcgccttgagacgagcaacgaagcgtcccagcgactcatcaaggtaggcaaaggcattcgacacgggcgaagacaggcgcttgtacggcacgtcgaagggctcgtgactgctgagcgtgagcatcgtcttgtaccacgggcgatccgaaggcatacggacgatctcatcatagaggacgtcgaaggcagggccatcaggcacaccccagttcgtccgcgggaggctacgagggagcgtgtgatcgtcggtgacctgctgatagcccgatccgaggaggtagcccttcataccggtgaagttcgcatcgcccccgtagaggaagctcgtcgcatagcccgcctcacgcagactccccgcgatggagggcagggtacggctcttcacagggagcttcatcaccgagtgcgtggggaagctcgtgtagccactgaggatcgagatgagcccgcggtcggtgcggtagctattggcatagcagcgcgagaagaggacaccctcacgagccaagctatcaaagtgcgggctgacctcgggcttctcgcccaatacacccgtatagcgtgcgccgtagctctcgaggatcagcaggacgatattcggtctgcgggtcgtcagcagcgtatcgccctcaagggactcggcggggaagaggtctttggtcagctcaccgagcgtcttctcatcgaaggcattatactcggcatcatagtcctcggccttcccgagcgaggagaagaggctgaagagcggattgacggcagcatgattgaggtactggcgatcactgaagtagacctgcccgacattggctgtcgcttgactcacgcccccacggatcatgaggaaggtcgggcctaagaggaggacgaagggcagggcgtagagtccgccacggcgaagctggggccagcgcacctccgtcgtgcggtcgagggcgaagccaacggataggccgatgacgagcacaagaaggatcgagagcaggatgaagggaaggctgacacttgcgaaggcttcgcctggctggtccagatagaggaagatcgaagcatcgagcttgaagccccagaagggatagagccgcacatcggtgatgcccacgatgctgatgagggcagccgtgaggatgtgataaggtcggagggcgcgacgggcggggaaggcgcggaagaagcagctcactgccgtcgtcaagaggggtatgacgagcaggtagcccagcacggagaagtccaagctcagcccataatagagtacagcgaagatgtcccccatactcagcgccccttcggctgggacgagcagcaggaagcagcccttgaggacaaggaagctcagcagcaccacgagggcgaagcggaggaggtaaaggattcgtgagcgcatcgtgcgacgagtagatctatttctatttgccacaaaggtacggcttgccccgctaatcccgctcgctcacagatgcactcacttcttcttagccttatcacgtagggaggcatagctcgtcacgacatcaaacttgagtttacctcctgagatcgcatcaaagtgcttacgtgcacactcgatcttgatcctctcgatttctcttagctggagcatactctcagagcccttagtctcagcgacgaaatagacgtggttcaccgtttcctttccctttcccttttcctctcggaagacaatagcccagtcaggattatatcttcctgcaggggtattgatatagaagctacgtgggagcttggtgtacacctcgacctcttcatgcttctccagctccttggcgaactccatctctgtccctaaactatccacgacgataaggtcatagagagccttctcgctttctaatgcatcaatacctatacttcctcgaagctcttgatcctcaaagatcgcctggctatatatctgggatttcggcgtcatcgcacgataggtaatacccttagtgacggcactaatcttcctcccatcaataatgtcgccagccttgatgatgaactcctctggactttgactgtacagcttgaaggtagcaggcttgatacctcgtaggatttcagcaatggtctggcgcttgagtcttgtacgtcgcaccaactcaccaataaggtcatactgtagagtagaagaaggtgaagaaggtaccaagctagacgtactcctatactttgaggtcaccgcaatctggactgtagagactgacaactcagtatccagtgcctcaattgcattctttatcagctgcggtgtatcaagctccacctgatagtaggtcttctctttgatcagatcccacagcgcttcgaacttattaaagcgcgctttgcagaatttagccgtccttttcgtttgagcatcttcaatcttaaccttcgtaggatcaaccactcggtcaagcacctgtatcaatgaaggagtcaagggatatggtacaggctttgcctccttatccttgaagtatttagcagtaagtagctttagcttacttatgtagccagcattaataagctcccagatgagccctgaggcatcctgttcattaaacacgcgacttccattaccatcatcaatagtcttatctataaatagatcctcatccacctgtgtagggcgtgaagtaccattgataatctccttctgcagggcttcagaaaaggcttggtaactctcactggcgataactgtgaggatgttggtatcatgcacagcatcgcctaagagatcactatcttggcgcacaccgttttgatcgacacacagacgcattcctcgaccaacctcttgatgcttcttggtggtgctgttactatgcttaagcgtacatatttggaagacgtttggattatcccagccttccttgagcgcagagtgggagaagataaaacgtacaggttcttcaaaagagaggagacgctccttatcacgcatgatgagctgataagcatcagagccatcctctgtatcagctccagattgagactttgtctttcctcttgcatcttgcgagaagtagccattatgtggcgccttattttcctccttccacttcctatcaagttcatcaagataggcaaggtaatctttgtcttttgcggggtcaagctcctttcgtagcgcaagtagctccttttggtattcgtcttcaaatatgttcgcccagcttcccttttttaccatgccacttctatcatagatgcggtacttatctaccgcatctataaagaagagactcaagaccttaataccctgtcgatagagctgcctctcacgctcaaagtgtgtccggatggtttgacgaatctgttcacgacgaatccggttagtgacccctcctgtggtgcaccccacagcaagttttctaccgctacttagtcgaatgaagcctccagctacatcaatatcatcaatgcgatagccattatggtaagcctccagtcctccgctcttttcatagatgtcacctcctttatcgataagacatctggaaaaacctattccatccttttgcttcttttcatagacgatgcgtgcacgcggagctccattattcttagggggtatgatctcatcaagatagagataccccgtggtgcctgttgtacccacttgatgtaccccgattacctcgatcttcttgaccagacgcttatcgtaggcatcaatcgcatcaagacgatacacctggttgtagacatcttcggggcggtgcgtcgcgctatataggaggtagaagagtggattgaattgcttcagcccttcacgtgtcttattctgcttatctgctccaaggacactctgaggctcgtcaataatcaggatgggtcgtgctgccgcaagcacctcaattgggcgctgccaaccgaacgattctaattgcattgagatacgtcgagccttatcatccgtagcgttgaaggcctgcatattgatgaccattacttggagcttcggatccgatacaaactgattaatatccactaagcgggagctatcatagacgaagtactgcatacgctcactgtactccgtcgcgaagtgatctgacatcgtatcaaggctcttgatgacaccttcacgaatggctacactgggcaccacgatgacaaactttgtccatccgtagtgtttgtgtagctcgtacatcgtcttgatataggtataggtcttccccgtacctgtctccatctcaatactcagaggtaaggtaccatgctcatcacgttgcacggcatggatcaactgaagtccgtgtcgcgcttgcacggcacggatattctgtagtaaggcttgatcctggaggaaaagctcctgattacagaagccatattgctccataggcaattctccctcgcgctctccctgaatgtagctcagaagaccttggcgtggctgtcctttgaagacatctaccacggctttagctgcctctatttgaaacccctgatgcttgaactgtagtttcatagccccctatatgatatggatacgacgacgactctcctccgtactccagccacagcgttgcttgaactgctcatagatgttgagcttatcttcatcggccgcaaagcacgattcacggaagagcacacgtaagggattcagctcagctatcgcacaaatcacctcgaggtcaatgcccacgtcgaagcaagcaaccaaagccccttcattcacgatgtgtaagcgtttgcctgtcacctccttttggcgaagggggacactcagctctattcccaagtctaacatacatccaaagagcaaatccagatcgctgcggcctttcttcacgctatctgcgaagagctgatctttctccagcgtggctggatcaaagtacacctccttcatattcgacgtatcaacacgaagcacacggaagcccgtatcaacctcgggatgttccttccgaatctcatcaccagctctacgaatacgctcctttgcaagctcgcagatattgaaaggcttgtctaagctcttgagcaaggcaacagcattatcaattatctctttctgcgccttacttatctcccgttttggggtctgctcgaaatcctctgcaatttgaacgagaataaacttagcctttcctccgatatgctccttattcatattcattacagcctcggcagttgtcccagacccagagaagaagtctaaaacaatgaattcttcttctggcttgatgaaattcaatagatactgaataaggctacaaggctttgggaagctaaatactttcttgtcaaatagcttaagctgatactcccctgcattctcatttgtctctacacccaccttagcattaatgaggttagttggcacctctggggcatactctggtttttcatatgaaggactaagggtatttctcggaattcgaataataaccccctccttaagagattggtcaagatataactggctccatttaaactttgccttcagagagaaatcggaaacaaacacaccatctttaacctctacatcctgcagaagctcaatcacatattttcctgttccatatgagccagccttcaatacttgatcctgcatagatgttaacaccttacctccaggaaaagtaagaactcccactgcattagattgatttaacaggccatttgaactctttgagctctttgatactccattaaatctagtttgcgagagcatctgtttttgataacagagtacatattcaaccatttgcctacacttcttcgataaattttctggcgtttccgtttttacccagttaaatgtcccgacgaagttacttgctccgaagacctcatcacagatcatacggagatgatgcacctcattgtcgtcaatggagatgaagataactccatcttgagaaagaagtgagtgtgctaccttcaagcgactatacagcatcgagcaccaatcagaatgatagcgtgcatgggtcttttcattagcatgcaggcgattgccttctgcattgacatcactagcgaacctgccatactcatcttgattcattgtaaagttgtcgcggtagatgaagtccttccctgtgttatatgggggatcaatgtagatcatcttgaccttgcccatataggagttccgaagaagcttgagaacctcgaggttatcaccctcgatatagaggttctgcgtattgtcccagtccacactaccctccacgatggggcgcagcgtcttgcgtgtaggctcatccgccgcacgctttgcgtcctgcttaccgacccagtagaagccaaagcgctccgcattgctattgctgatattgtctccgagtaactctttcaaggcttcaaagtcgaccttgtgtgtcagctcaccatgctcatcacgcacttcggtgaaggcggatggagctatttgtctcaaggcttccagcatgaagtcactatgcgaagctgaggtcagcttcattttcttggcacccatatttcctgttgtgttagtttcttttctgatcatcagcggggattcattgccccgagcgaagtacacgaagatactgaatatctccttagtaatagatagacgcatagcaggagcaggctggtactccttcgtgtcacaaaggtacggcttgccccgctaatcccgctcatcagggaggtatattcaccttcaccccgaccctttgcccctccacactacgagggggtggtatcgacctatattggatggcgaagaaagctatatagctttgtgaagtgacctatatcaggttgttgctccgcgcagggataaaagttgtggacaagtggcagataagtttgggctacgtacgtggatctaatagcttcgtacgtggatatttggactgacgtgtctggtctttaagactacgtgcgtagacagaggaaaagcactacgtgaaggcgctttttccctctcgagaaggacacttttccctccgctggataagaggaatacgcgcaataaagcgaaggccttgcgtatcactacggcgaggcgtatcggggagctgggcgtacgatacctttgcatactaaatagaggacaggattctaaggcaacagtcacattcagagggcgcgcagggaggagtgaaaagagaagccccacggcctcccttcgtgagggaagccgtggggctgatgtgtggtgggtgaaccttgccgcagtggcttagccgcggtgtgcgatgatctcgatctctacgagaccgttcttaggcagcgtcttcacagcgacggcagagcgcgcggggaaggtgcccgtgaactgcttctcatagacggcgttcatagcagcgaagtcgcccatatcagcgaggaagcacgtagtcttgacgacctgatcgatggtgaagccagcttcagcgaggatcgcatggatattgcggaagacctgctcggtctgagcggtgacgccttcggggaactcgcccgtagcgggatcaataccgagctgaccggatgcgaagagcatatctccgacgaggatagcctgactgtaagggccgatagcggctggtgccttggtggtggcaatgacttgcttcatgagtaagaggttgtatttaggtgatgaatagttggacgacgggggcgattacttagcgttgaatcggttcatcgtggaggcgatcccctccaggcagaaggcgatggaggcgttgacgaaggtctccagacgctcgggcatctgtacctcttcctctggggagaaacgcccgaggacgtagtttatttgtgcgccctgtgggaagtcattcccgataccgaagcgcagacgggcataggactgcgagccgaggagctgggcgatattcttcagcccattgtgacccgcgtcacttcccttgcccttgaggcggagcgcaccgaagggcagagcgaggtcatcgacgatgaccagcacgcgctcgatggggatcttctccgtgctcatccagtagcggacagcttcgccactgaggttcatataggtagagggcttgagcaggacgatctgtgcgctcttagcacgacccatagcgacatcgccgtagcgcttcgtctcgaagcgcacagccagacgggcagcgatagcgtcggctacacggaagccgatattgtggcgggtcatatcgtattcagccccgatattgccgaggcctacgatgaggtatttcattgagtggggtaaggggttattcgtaggtgaggaggacgttctcatacacggcagagagatcccgagccaggcgcttcggcgtgaagcgctctacgtactcacggccatcggtgatcatcttctgacgcagggagatgtcgatgaggacgcggtcgatcatgctggcgagcatcgtggcgtcactgggatcggtgtagaggctgctggggccaccagcttcctccagacaagagcccgtagcaccgatgacgggcacaccggcattcagagcttcgatgagcgggataccaaagccctcgaagcgcgaggggtagacgaagaccttcgccccggcatagataccagggagcatcgccgagccgacgccgtgcatgagatgcaggcgggagaggacgcccaagcggcgggcgctgtcgacgacggtattcacatagggcgtcttacgaccgaccgccacgaggtggatgtccttatcctgaagctgagcgagtgcctcgacgatgagggcgaggttcttacgctcctcgatactcccgacgaagaggatatagcgctcggggaggttcagtgcctgacgagccactacgacatcctcgggcgtcaccgccgcgaaggcttcggagcatccctgatagacggtcgtcacacgctcctcctcgatgccgaagatatcgatgacatcacggcgcgtctggtcgctcacggtgatgacgtggtcggcatgacgggctgaggcgccgtacttcttgcggtagagcaggcggtcaatgggcttgtagaactgcgggtagcggatgaaggccaagtcgtgcatggtgacgaccgtacctatgcgctgggcattgtacagcccgatgggaagctcattggtcagcccgtggaagaggtcgacctgctccgtacgacagcgcgaggccacggagaagttgcgccagagattgccccctgcgaaggccagtgcacgatggggcgtgatgagccgcaccgagcgattggacagcaagcgcttgtagagcgaggggtcacccgtggagggcgagaagagcagatagcggttctctgggcggaactccgtgagcgtatcgagcacgaagcggctgtagttcccgaggccggtagcattgtgagtaatgcgcttggcatcgaaggcgatattcatcggctcagtgaggctacaagagggataagggacggggacgagtgcactacttcgcctcggtggcggtattgtagcggaagagcagcgcgaagagcacggctacgacagcagcatagccagcgaagatataccagctcatgctccagcccgagaggatcgccgtcgcctcactctgagagtagacgaagcgattgatcaccgcctgcgcaccgagcgagccaagcgtcgcaccgataccattggtcatgatcatgaagagcccctgcgcactggagcgaatcgaggggtcagtctccttatccacgaagagcgagcccgacacattgaagaagtcgaaggccaccccgtagacgatcatactcagcaggaagagccatacgccgctacctgggttaccaagaccgaggagggcaaagcgcaggacccacgccaccatagcgatgagcatcacacggcggataccgaagcgacgcagcgcaaaaggtatgagcaggatgcagagcgtctcggagagctgcgagagggagatgaggatattcgcgtgcttcacgccgaaggtatcagcgtaagcagggatctcgccgaaggtgctgatgaaggggttagcaaagccattggtgatctgcaggctgacgccgaggagcatcgagaagatgaagaagagcgccatcttacgctgcttgaagagcacgaaggcacgtaggccgagggcttcgacgaggctcttgctctgccccttgggagccgtggggcagttgggtagcgtctgcgcgtagagcgcgaggacgaggctgatgatagccgagacagcgaactgcccactcgtagcctcgagaccgagcaggctcaccgcgatcatcgtgcagatgaagcccaccgtaccgaagacacggatcggagggaagctcttcaccagatccagccccgcttggtcaagcgaggtgtaggcgacggagttgctcagtgccagcgtcggcatgtagaaggcgacactcagcgagtagagcgcaaagagggtgggataagagggcgtgtcggtctgcgtgtagaggaagacgccgagcatcagcatccctgccaacatatggcagacccctaagaggcgctgtgctgggatccagcggtctgcgacgatacccatgagagcaggcatgaagagcgacacgagaccttgcatggcgtagaagttcccgatctcggagccgaagcctgcggtaccgaggtagcgccccatagaagtaaggtaggccccccagactgcaaactggaggaagttcatcaccgtcaggcggagcttgatggaggactgcatagacgtagtcgtatatgtgcttaggtagtgtatagagtgacgcccacagagagcagggggttctcggggtgacgaggcctgttctctgtgggcgtcagataggggtttactgctgctggagctgtacgctcacgaagctcacctgaaggtccgtggtagccttcgagaggcggaggaagctcggacggatgagctcagcgatgcttgcagggccgttggagcgcgatgacgtcaccgatacgggtacgaggctcagctccagtggcgtggagatcgtccagcccgtagcggcggagtaggtggcgtactttgccagatgctccgtgacgatgcgggcgatgttgttgaacttatacgccttgtcgctggcggcgtacttcttcgagaggtacgacttacccgactggacggcctgcacatcggccgagaagaactccgtcaccttgtctgaggggaggagcaggaggtagtcgggctggttcgtgcgctgcccttcagggctattgaccttgatggagaagttcgcatcagcgagcatccaagcgcggccgatgaagtcgctgggcacaggcgtcgtggtgggcttaggcgcggaagcgaggagcttctgcagctcgctcaccgagagcgtgtacttcgtcgtcacgccagcggggcccttgacatagctatactccgtagacggagccgtgaggctcgagatgtcgccactgctcagggcattcaggcgtgaggtaagcttcgtatcgacgaaggtcttcacgtacttcacgcgctcggcgggcttctccttgttgggcacactgtagtggatcatgagagcgacctccgtgacctcgaggaggaagccacgacccgtgacaggtgctacgtagaagccagggaagatctcgcggtcaaagcgcgactgcgagttgaaggcactcttcagcgtcgacgagcgcgtcgcatcgaggaagtgcttcccgaggctcacatccagagggatggtgaagtagcgcatcgtggagttctgctggatgagcgtcccagcgctgggctggatggtggcagagcccaagagcgtcgcgcccgtgcggtactggccgagcgtctggctcgaggtaccagccgtggtgacgggctgagcgagcttgtagacgttgaccttgatctgggcatctgcattcccctcggtgcggtccgaatagatacggaagtagaccgagtcaatggttagctgggcattgtcagcctcctcgaaggcaaccccttcggcagtacggatctgcttgatgaactcacccgtgatggtcgagcccgtctcgtcgatgagcgtaccgaggagcgaagtcgtaccatcggtatagagtgtaggggtggctaccgtggtggcgtcgaaggtgatcgtcgtcgcaagcccggtgaccttgtcgcggttaggctggatgctctcaccgatacccgagaggttgtcctcggcgcaggaggaggagagcgtcacaaggcccagcgagaggaggcctacatatagagctgaagcaagcttcatcatgggaggatcttcttatagaattcattatacacctcggcgcacccttcgacaggagtataggggaggaagttcaccccactctcgtcgatgtactgcttgaggctgggcgagatctcggcactaccctgtacgaccccgttggcgtagtggatggccaggcggttcagtgcctcgtagtcggtcttgccatcgagtacggagagagctgcgggcttgatcttgtcgaacttcaggcactcgaagagcgtgtcggggatctctacgggagcgggctcatcgtagagtgagtagatgatcttggccttcttcaggcaagggtcatcgtggtagtacttcttcagatagagcatacccagcgcggtgaaggtaccgtggcagtggatgatgtcggggatccagcggagcttcttgatggcttcgagggcaccacgcacgaagaagatcgagcgctcgtcgttgtcgttgcccaccttggggtcgacgtcgaagacggtcttacgcttgaagaaatcatcgttgtcaatgaagtatacctgcaggcgggcggtcggcagtgaagcgaccttgatgatcagtggatggtcattgttattgatgatcatgttgatccccgagaggcggatgacttcatgcagctgattgcggcgctcgttgatgacaccgaagcggggcatgaagatgcggatatcattacccagctcctgaatcccctgcggcagctgacgtgccgtcgtcgcgatatcggattcggggaggtaagggaagatctcctgcgagatatacaatattcgtcttgatttcattcgtctatcgattatactttttgatgcggctcccccgagggggcgccgtagtagccccgccgctgatagggcatagagcttctacaaagatacggaatttccctcggagcacttccctacctgcttctctcaaagcatctaatccctcttggaatgagcctcgaacagcaatcacctatctttactttactctcaagggaggctcccctctctcattcatcgcaagagtacagatcgtaacacatcacaagcaatgacaaaatcactcatcatcgcaagcattatgatccccgctctgctcaccagctgcggcaaaggcagcaagggcacgatagccccccaggagcagacctctgctaccgacagcctccccctcatcggacgaacgctccatatcgactacgggcagatgcaggcgatcgtgacctacgggcaagacacgctcatctggcagaccagctctcccgacggcaagacctctgagcagacgaaggaagagcccaactacgaagccctcggcgatgggcgtaccttcgccacctggcaggaggcgagcggcgaagtcgtcgcacatatcgtagacctcaaggcccagcaagtcaccgccttcatctacgcccccctcacagaggggcagacaagtcgctccgccacgcgcctgacgggcaagatcacacagcagtaaatcccacgcccccctatagcaatgccccctccatcagtagagatggagggggcatcgtcatatagagcaggctattacaaaagggactcttgaccagtcctcttcatatagcgagcctataaaagcgaagcaccgacatacctcacgaggaggatgtcggtgcttcttgcttggtagcccctgggggaatcgaacccccctttcaagaatgaaaatcttgcgtcctaaccgatagacgaaggggccgcctgaattctgtctcacatcttctcggagagaggtgcttgacagcagatggggagagtggctactcttagccgaggcgtgcaatctgcttagcgagcttgctcttgaggtttgcagccttgttcttgtggatgatcttcttgccagcgaggcggtcgagcatcgagctgagctggggcagagctgcgcgagcttcagcagcatcggtcagcgcacggaagcgacgcacagcgttacgagccgtcttggcgtagtagcggttgtgcagacgacgagcgttggtctgacggattctcttgatggatgacttatgatttgccatttgtatcttttctttttgttgttatcgtagcccatgggggaatcgaacccccctttcaagaatgaaaatcttgcgtcctaaccgatagacgaatgggcctcccaatgtcaaccgcctaccacatgagcagcattcagttgcgagtgcaaaggtataacaaattatttatccaccaaacaccctgagcaaattcatcacccttacctatatatgtataagctactcgaatacgcttcccgagcgatgtggcgcgcagttcacggcattacggcaacgtggaagataattcgtgtagatcgggtagcaaaggatgccggacgggtgaagtacccgaagcggggagaaaaatcgtcccttgcaagacactgagatataagcacctttgagggggcaaaaagcaaccagtactggtcagtgaagcgagcagtactggtcacgcgagtgaccagtacgagttgactatggtgaccagtactggttcgtcgtgcgaccagtactggttactttcccctatcgagaaagcccgtcagatagccgtgccactcccctacccctgtgctatgcgactcctttatttctataggcttcgcggatgaagctcggtaagtcaaggtgcaaacaacaactcgttcgcatacggatgaatactgctctaaagccgaatgactattggtcattgccccgacctatattggtcgctgggctgacctatattggtcgtcacacggagctatataggtcagcccagcgaccaatataggttcacatcgctcccccgcagagagcacatcagccccaccgccactaccctaccacatatacgacacatcccccacggagctactccgtaggggatgtgtcattagcccgccagataaaggggcgggagatgaagcaatgggtagcaactactgcatcaccttacgatcggtgaagagatagaggcggtcgcctgggcgcaccttctcggggacagcgatcgagcagagctgacccttgacggccttctctacaggctccatgtccacgcggatctcctcgacgacaaagcgcacaagccccgtcgtcggccccgtgatgatgatctcatcaccgaccttcagctcgccactctcgacggcgaactccccgacaccgaccttaccgaagtacttcgtcgtcttagcgacgtagaccttctgcttcgtagccgaagagccgtagctcgacgtccattcgccgaggcgctgaccgagataatagccgtcccagaagccgcggttgaagacctgcccgaggtggttgtcccacttctcgacattgtccgtggtgaagttccccgcgcaataggtgtcgacggcctcacggtaagcacgcacgacggtatcgacgtactcggggccacgcgcacggccctcgatcttgaggacgcgtacaccagcatcaagcatcttattgaggaagtggatcgtcttcagatccttgggcgacatgatgtactggttgtcgatctccagctcgatgcccgtctccttgtccttgacctcgtaggagcggcggcagatctgcgagcaagagccgcggttagcactcttaccctgctcgtgcaggctgaggtagcacttacccgagacggccatacagagggcgccgtgggcgaacatctcgatacggatgggctcgccagcagggccgacgatgggctcctcgataatcgccttatggatggcagcgacctgatccatattcagctcacgtgccaagaccacgacgtcagcgaactgcgcgtagaagcgcagcgcctcgacgttggtgatattgagctgggtggagaggtggacttcgacaccgatactacgcgcgtagagcataggggcgacgtcggcagcgatgatagccgagacgtcggcatccttcgccgagtcgatgaccttgcgcatgagctcaagatcttcgtcgtagatgatggtattgacggtaagatagctcttgacgtcatgctcacggcagatcgccgcgatcttatagaggtcttcggtggtgaagttattcgcactcttcgagcgcatattgaggccttcgataccgaagtatatggagtcagcacccgcattgatagctgccatgagcgactcataggagcccacgggggccatgatttcgtaatctttcctgttcatttgtgataaatagagatatggagtgcaaagatagctcaatatagctctacggactttccacctccatagagaaagtctatcagcacccctatacaaagcatccgcgcccgatacctcggtgggtatcgggcgcggatgtaaggtggttattccggaggaaagaggctatctgcggcgcgtcgtggtagcagcgggggcagccgaagtcgcggcgggtgcgaaggcttcggtgataggatgaccgatgcaacccgaggggtactgcgtcttcaggagagctgccagcgtagcggcgatatccgtgatatacgtctcacgatagagatggcctgcgcggacgccatgccccatgaagatgagggggatgtgcgtgtcgtagggagaccacacgccgtgtgtcgtaccctgcggcagcgaagtacctgacttcgagtaccaccctggatcgggtacgatgaagatatcaccactgcgccccttgcggtagccgttgatgatacgcgtcttgatcgcatcggggatcgcagccatagccacttcttcggcaggcacagcgtaggctacaccagggagcttatccttgagggccttgcagatcgcctgatagaggccgtggcggttgacgccaagcgagtcgatgaggtcctgacggaagaagacctgatagttcatatacccgcggacgacctgtgcatcacgtccgatgtaagcacaggctgcggagtcggctatacgacgagccagatcactgcggaaggcctgcccggggatcttgtggtcacggtcgaaggtgaggttgtgcgcagcagcgtggtcggcagtgaggatgaagaggtagccgtcacgaccgaagcgcccatcgaggtagccgaagaagtcggcgagatccttatccagacggaggtaggtatcctcggtctcgacagcgaaggtaccatagcggtgccccacatagtcggtagccgaatggctcatagcgaggaagtccgtctcgtcagcacgcgagccgaggctttccccttcaatagcggccttagccatctcgaaggtcagcgtattccccataggcgtggtgcggatgacaccagggcccttgatcttcgccagctcagcggtgttgagagggagcgtagcggggaacttgccgtccttatcccagggctgctcatagggcacagcgtcggccgtgctctcacgataggtattgataggatagagcgtgttccagccgtccttgaggagctcagcgacacgaccacgagcgttgaacttcttcacccactcgggcaggtcctgcatatagtaggtgctggtgatgaagttgcccgtcttgtcatccagccagtaggcaccgttagccgtgtggcctgcggggaggatggaggcgcggtccttgatagcgacaccgatggtcttcgagcggaagttcgtagcgatgcgcagctcatcggagatagttgtagtgaggaggttgcggggagacatctgcccgctgacgccgttgggtacaccgaccgagcttaccgtcgtgtcctgcgtgcagtagatggggctgccatccttgaagaagtcattccctgcgataccgtggattgaggggacactacccgtgtggacggagctgtggccgatagcggtataggcggggatgtagttgatgcgggtattctcgcagttgaagccctgcgtgaggaggcgcttgaagccaccctcgacgaagcgagcctgatagcggtagaggtagtcccacgtcatctggtcgaccatcatcgtgacgacgatgcgggggcggttgtgctgtggagcggccttcgctgccacgggcgcggtgagcgtgagcgcggtcaaggcgagggcgccaaagaggttcttatgtatcataatgtagggtgtgaatgttcgtctttcgtgggctaagcggggaggagcagctcgacacggctccagcgctgacgcacttcgctgctgacgaaggtgaggccaagctcttcgcctcgggcacgcaggagcggtatatcctcctcgtagaagccgctgaggatgagacgtgcgccagggagcatcacctcgcggtagcggggcatatcctcgagcaggatattgcgcgtgatgtttgccaagatgaggtcgtagccttcgcgtccctcgagtagggctgcatctccgcagagcatctcgtcgatggtgacgcctgagagtgcggcattctcctgcacattggcataggcccaagggtcgatatcgatagccgtgaggtgacgcgcgccacgcttgagagcgataaggccgaggatacccgtaccgcagcccatatcgaggacacgctgtcccgagacgtcgtgcgagaggatccattccccgacgagggaggtcgtctcgtgattgcccgtaccgaaggccatcttggggttgatgatgatctccagaggcacctcgggacgtgggtcatggaagggggcacggattaggcacgcgccatcaccgaggaggatgggctggaagtaattcttctcccactcctcattccagttgatgtcgggcagctcctccgccgtaagcgtataggagaagcctgcgacggggaagccatcgaggagctcgcaggtcgctgcggcgtcgtactgctccgtagggatgaaggccttcagctcgtaggcatcttgctcaaagctatcgaagcccaagggctccagctcggcgataagccagtcgctaaggtcttcatcacgaagagacgtggcggcgctatcgtagtggtagctgatagtcagctgtaggtattgcatagggatagatagggatgaataggcgggagagccgttagcctaagacctcacggagcacctcatccatagcggtagcggtgcggtcgaagtcctcacggctgtgggccatcgagaggaagatacactcaaactgtgaggggggcaggtagatcccacgctcgatcataccacggaagtagcgggcataagcctccgtgtcggagcgcttagcatcggcattcgagtgcacgccaccgggtgtgaagaagatcgtcgagagtgagcccacacggttgtacgagaggcggtcggtgtagcggtcgaggataggacggatcgttgcctcgaaggcctgccccttctcctcaagacgggtatagaagtcaggctcggcgagcgtctggagcatcgtgatacctgctgccagagcgagcggattgcccgagagcgtccctgcctgatagacgtcgccgagcggcgccaagcgatccataatgtcggcacgaccaccgaaggccccgacggggagcccaccaccgatgatcttcccgaggcaggtgagatcaggacgaataccatagagctcctgcgcaccaccacgggcagcacggaagccgctgatgacttcgtcgaagatgagcagtacgccctcttcctccgtcacacggcgcagctcctcgaggaagcctggtgcgggagggatgagccccatattgcccatgatcggctcgaggatgatagcagcgacctcaccacgatgcgcctcgagggtgcggcgcacgctctcgatatcattgtaggtagcgaccagcgtgtcctcgatgatgtgcttcgtcacaccagcactcgatgtctgaccaaaggtagccagccccgagcccgccgagatgaggaaggtatcggcatggccgtggtagcagccctcgaacttgatgatcttgtcacgacccgtgaagccacgtgccagacggacggcactcatcgtcgcctccgtccccgagttcaccatgcgcacacgctctaccgaggggaagaacttcgtgcaaataagctctgccatctcgacctcacgggcattacaagccccgtagctcgtacccttctccagctcacggcggatagcctcctggatgggagggtaagcgtgcccgaggagcaggggcccccaggagctgatgtagtcgatgtattcattcccatcgacgtcaaagacgtgggcgcccttgccgtgatcgatatagaggggggtgaggcctaccgagcggaaggcacgcacggggctattgaccccgccggggatatactgcgaggcgcgctcaaagagcgcagccgaagagtctactcgtctcatactatctattgaagtctcgctggcgaggcccaaaggggagctactgccagcctataatatgctctcctacaaagttaggagaaaatgccgaggggaggggtttctcatcgtaccctcgccccgaagcacacctcgactatacgcgctgaggcaacagctcacccctatacaagtgccccgccccaccgaccgcaagagcggtagatggggcggggcgatgtcttagcgtagcacgtcaggctacgagaggactactgctgatcgtccttaggattggcctcagtcttcttcttgtagtcgctgtaagcgtagtagatgacagcgataccgatgaggatataggtgatgaggataccagggaagccaccgatcttatagacgaggtgctcgtagcggttgacggagaccgtcccccctgcgtcgtaggtagctgtcatagtgacaaagcggaagataccgaaaccaataacgataagaccgcagacagcggagaggatagcaccggtaataggcttacggctaccagaacccgtgtacatattacgggagatgaacttgttgtcgttgtcgttgctcattgcttatagggatttatgaattgaaagacgtggggattacttagccggacgcttggagttatctaacttaccataatagaagacttcgagacgctcacccgagcctgtagactggaagtagatgctgggatagtctgatgaggacttcccgggctccatacggaagactgccgtgaacgtgccatcggcactgatctccttagcgaaggggccgtcgaactgctctcccggaccaagaggctcggtagcctgcaggcggaaggcgccatcaggctccacaccaatgatacggcaccagttgatattgacaccactcgaagcaggcttaccatcaggcttgtaggtcacgataggcagaccgatatgatattcatcacccttgacggggggctttgtcacctcttccgtagcggaagccttctcccagctatcatacgtaagctccttgatgatggcgaaggctgtaaggagaacgaagaggacagccagcgtaaccatagccttaccccccactgtgagacgcgtaccagctccgggcacgggggtgcaggtagcggcgcattccttatagaaagcctccatctcatcggtccagtgagccgcagcgatatcctcgcccgtggccttgacgcggtaggcagccgtgggcttcttgcgcacattgcgagagagccacgtctcgacagtaagagagtacaggacgagctcgagggtctctacctcaccagagaggggagacttgaggttgacctcgaagaccttaataggagagtagttagatgagacggaaatgaacatctgacggatagtgattaggaagtgaagggatcggggtagcgatgaggggacttaaagcagcgtcgccgcagtctctacccttatatcttactacgatttgtctgccaatttagtataactcctgtagctcgcccccctttttgaagaggatgagcaggacgctcacatcggaatatgaaggcatccacgtggagaaccagcactacaaaattagggcaaaaagccgaagacaggacgagagcgagtgcaacaccgtcaggagctttatccagaaatacaacatctaagcaaggagtactcaactaatgaaatagtaattgggggatagaaccagacgttctatcccccaattgccgtttatgcaaggttaatccttgaatatttcaccaagtgcatccgccaagctctctaactcttgcctaatcagttgagcaagttcatatgctccgttttctttggagatataggtcttgaggtcaggatccaatctgagacagcgaatattcgcaggagcaccaggattcctaaatgggacgtactttctcttatcccaagcctccctctgctccaagcacgctacaacttcatctttgaaagggcaacttttgttatagccgcgtcgatagctaatattcaacgagcaatctttcgtttctgcaatgcgcacttggaggtaatcattgaggtagatcagatttttatcgtcagatgacgctaaagcgatctcctctttgacgatacgcccgacttccaggagaaagacttttgcgctactgcctttcagacgctcccgataggctcggagctccagagggaatttggactcaattgcctctgcagtatgatcagcctcagaagcattaaataggaatgctaagaccttacctagcagatctgtttgctcattggtatagcaactgctcgtatggggtatgccgtagacaggagtagagccgatcctcgtataccaaagcacgcctgggataagagcttctaaggtagtctcatacttggggaaaagctgatagaggcagttcgctccaccgaggcataataccctctgaggttggagaatttggattaaatcccgtgttagttgaaccacctcaggggctttcatagggttggttagcccgctttcttttttagaattaaaatgaaagacattgctccacacaagagattcatcatcttgaagcatctccagcatatttccttgagcgaacaggcgacacagtctttgccacattgtccacgagcctttcgtgtgatattctcgattcccctggagaaattctttcgcagtgagttctttcccatcactatctgccgatccagggttaatcccaagcaatagaagcttaggagccgaatggagcagacttagattagactgtgtgtaatagttcacaccttcttttttagcgataggattatatacaccgactacacgttctgcccactcatagagtgaatgctgtaggttcccttcttccttttgctgcatagttatcttgctttgtatatgatatcgtaaatgtagggataatcttttattgccaaatgatactagtctctgacgacgacgcccacgctacccaggggtagcgtgggcgtcgtcaggcacatttagcgccccgagaggacgagcaggacgctcacatcgtggggcgagatacctgggatacgtgaggcctgaccgatggtgcgcggacggatgcggtcgagcttctgccgtgcctccgtgctcagcgcttgtatctcggcatagtcaagtccctcggggatgaagacgtactccagacgctcgagcttctcggcctgctcacgctcacgctggatatagccgctgtacttgatgaggatctcggcacactcggcgatctcctcgcggcgcgaagggatggcttcgatggcacgtcggagagctgggaccatctcgctgaggtcggagagcgtcagctgggggcgcaggacgagatccacgagtttacagccctgacgaagcggagcgagcccacgcgcctcgagctgaggattgatcttgtcggggcggatggagtagcccgagatgaaggcaatgagttcgtcgcgcaggcggatcttctcctcgagaaggcgcacacgctcctccgtagctaagccgatctcggcagcacggggcgtgaggcgcacgtctgcatcatcctgtcgtaggaggatgcggtactcggcgcgcgaggtgaacatacggtagggttcgtccacgcccttcgtgacgaggtcgtcgatgagcaccccgatataggcctcggagcggctgagcgtgaagggagggaggtcgtgcacctgctggtgggcattgatacccgcgatgagcccttggcctgctgcttcttcgtagccggtggtcccgttgacctgacctgcgaggaagaggcctgcgatgaccttgctctcgagcgtatggtgcagctgtgtggggtcgaagaagtcgtactcgatggcgtagcctgggcgatagaggcgcacatcacgcagtgcggggatctggcgcagggcctcgagctgcacctctaagggcagcgaggaggagaagccattgaggtagtactcattcgtgcgctcaccctcgggctcgaggaagagctgatgacggtccttgtcggcgaaggtgacgatcttcgtctcgatgctcgggcaatagcgggggccgatactctggatctgcccattgtacagcggcgagcggtcgagggcctcacgcagcacggcgtggcaggcctcattggtatagagcgtatagcaggggagctgacacagcgtcgagcgggtaggcgtatcgaggtaggagaacttatgatgatcatcctcgccctcctgtacgcccatctcatcgaggtgcaggctacgagcatcgatacgtgggggcgtacccgtcttcatgcggtcggtacggatacccgcctcctgcagctgctcggagatgccgtaggtagctggctcggagatacgaccgcccgtgatctgcagctcaccgaagtgcatcagccccgagaggaaggtccccgcggtcaagatgacggcatcggcagagaagtgcacacccagctgggtctctacgccacgcacacgcccctcctcgagggtgaggcgcgtgacggtgtcctgccactgatcgagtagtggctcgctatccagctcttcacgccaagcctccatgaagcgcatgcggtcactctgcgcgcgagggctccacatagcggggcccttgctgcgattgagcatgcggaactggatggaggtgcggtcggtgataagccccatgcgccccccgagggcatcgatctcgcggacgatctgtcccttggcgataccgcccacagcggggttgcagctcatctgcccgatcttattcatatcgggtgtgatgaggagcgtatgagagccgaggcgtgccgcagcagcggcagcctcacagccggcatggccagccccgatgacgatgatgtcgtagtggggcatcagacgttgaagcggaagtgcataatgtccccatcctgcacgacgtagtccttgccttcgacagccatcttaccggcctccttgacagccgactcgctgccgtagtggaggaagtcctcgtacttgatgacctcggcacggatgaagcccttctcgaagtcggtgtggatagcggcggcggcacggggcgccttgctgcccttggtgtaggtccaggcacgtacctcctgcaccccagcggtgaagtaagtctccagatcaaggagcttgtaagcggccttgatcagacgcgccacgcccgactcctcgagaccaatctccgcgaggaacatctgacgctcctcataggtctccagctcagcgatctcactctcgatcttcgcagcgacgacgaggagttcggccccttcgctggcgacagcctcgcggacacgctctacatactcgttgcccgagactgcggaggcctcgtcgacattgcagacgtagagtacgggcttgctggtcaagaggtagagctcacgagcgaccttctgctcatccttcgtctcgaaggagacggtgcgggcgttgaggccctgctccagagcttccttgtagcgcatcaggacgtcgcaggcgagcttagcctgcttgtcaccgcccgtctgagcctgcttgtagaccttctgcaggcgggcttcgacggtctcaaggtccttgagctgcagctcggtgtcgatgatcgacttgtcgcgcagggggtcgacactgccgtcgacgtgcgtgatgttgtcgtcatcgaagcagcgcagcacgtgcaggatagcatccgtctcacggatgttggccaggaacttattccccagcccttcgcccttgctcgcacccttcaccagaccagcgatgtcgacgatctcgacggtcgtggggacgatgcgctggggctggacgatctcagccagcttcgtcaggcgctcatcggggacggtgatgaccccgacgttgggctcgatggtgcagaaggggaagttagcggactgcgccttcgcgttggagaggcagttgaagagggtggacttaccgacgttgggcaagcctacgataccacattgtagggccattatgcgtattgattatataccttattataaggtgcaaagatagcgaaatgcgaggaggtctctaagagagccccctcgcatcacacatcacagcgcttggataagcgcctatcatttacatatcctacagcttactcacccttccacttgagaggtgtgacgacgccatcggagagctgaagcttcacccaaataccccccggcctgttcggcactgagatctcataaataggtttacccccattataaatccccaccaaggagaggattgtctctgtcccattgacaagccaagtcgaattattaatcacgggaggaagaaactcacactccagctccgcccccccattggcactcagcacgcgcacaaacgaggggtcaatcttcccctcaagagggtagaaatcggggcgtggagctgtgatcacaattgaattgtccgccacatccaagctatctttaagcagcctattcgtcttcccatcgacaaagcctaagagatgcttctgatacacctccacagtaatatcctgctgctggtcattgacgacgaggacatggaaattactctttacggggcgctgtcgatagggctcatccatccccgtgacacggcgaggagtatccttgtgacaagcgcagcacactacggctataagccatagcagcatcagacgagagattgttttcataaagcaggaacccttggagtatgatagcgatgaagcccaaccacaatttgaggcttatccttttgtagacgggggcgtttatattcatccaaccatacgtcatcggttgcagtgtaccacccgtttcctccatcgggtccccacccccagttcatatagatgcgatcctcatattctgtccacgtcttaagcttgatgaacaagaacttcttcgtgaccttataagcctgttcataatatccatcacagaaccagatatgaccatcatatccagtgccattcctgtagcctatcaaaagaactcctctttggcaatcaacctcctgatcaccatagacacgagccttaaacgaaaggttcttatagagtgtctcaatatcataattcacacggcctgcatctggaaagccgagcttacgcaatccatcaatgatctcatcaggatttgctccactaacatatggactccagcgatagttcggtatgctatctgctatctgacgaagaaccttcgagacctctcttccttggatgttatttgcagtggcaaacttggcatcatagtgaacacttggagttacagaagtgtagctaccattgatacgatgctcacaatcgtagagcaacatccctatagcaactgcagggcatccgattaagctcccatcctttgcagcagaattaaagttcccagcttgcgaccaattaaggtctttccccgtatgcgggtatatcgctggcttgccagatgaatattctcgagttgatcgcatccctgcaacaggcgcagtgttctccgggactatttcatattcatagtctttctttcccaagtccttccacttttcgaagtagggggagttaacccgactgggatcattgatattctttttcgctttatctatgtagccctgaagtgctccatacagaggattttccgacgacacttcagagaggacaaggtgtcccttatctgaatgagcaacaatcgggaatgagctattatcacctgacaggatcacgaatcctccattatttccgtagttaattgcatagagtagcgtatcacgcccctccacgtagtaattaacatccgaaatctcgcgtggtacagcgatagatctcaagttttgaggacgagagatactatcctcatgcttgaggaacatagtagcgtacatacgagcctgctgttcactgagctgaacactcgtggcagcttcctttgagggagcttcttgctttgatgcaggagtaggagcatcttgcttacaggagatcacgcccgcaagcagggtcatagacaccccacagagggcgaccaaacgagatagttttttctgtttcataagaccagattagttagtatgtaattaacgagtcaaacgtaaccaattatccccagactaccaaatccatagcttccaaactaaatccgaggagcacatcaagcctgtatcaaccgaaactaagcgaattctctggtaagaccgcccgctcgtagaagctcgttgcaggggctttcgagatggcaccctgctcatacagtatggtgctcccaagaggatgcttagcaggtcgatccgcagacaactattggtctgcactcaatccactatgggttcgggggtcaaaccactattcgttcgcaccccaaacaactactgaaccgagtccgaacgactattggtcattgctccgacctatattggtcggcgggctgacctatattggtccgacgacgaagctatataggtcgcgatggcgacctatataggatggcgaagaaagctatatagctttgtgaagtgacctatacgaggttattgctctgcgtagggagaaaagttgtggacgagaggcagataagtttggactacgtacgtggctctaatatctacgtacgtggatatttggatttgcgtgcctggtctttaagactacgtgcatagatagaagaataccactacgtgaaggcgcttttttcttcacgagaacgatgcttttccctccgctgaataagaggaatactcgcgataaggcgaggagcttgcgtgtcacttcgggggggtatatcgggggactgggcgcgcgatgccttagcacaataaatagagagcaggactctcccgcaaccgtctcacataggtcagcccgctggccaatacaggttgctttgcccccatccatagagggagataaatccctgatctggagcattgggtcgccccgccagcaaggagggactccccccttcctctggagcgaacaaacagcagagaacaagcacactaagatgaatagtgtgcaattgccgttttctttctttattccgcggtaaaaagcgtaactttggtacgaggaaatcaatgagcacaaagatgaaagacctaccgctcttctatgccccagccctacgtgaggagctccagctccccgagggagaagcccagcatgccatacgtgtgctgcgcgcgaaggtaggcgatgagttcctcgtcaccgatggctgtggcaccctcttcgagacccgcgtctcaggcgtagaccgccgtcactgcctcctctcgatagagcgcgaggagccctggcagaagtactggagagggcactgggccgtagccgtcgcccccacgaagaacatcgaccgcctcgagtggacactcgagaagatggtcgaggtaggtctggatgaagtctacctcatccgcacccagcactccgagcgcaagcataccagcgccgagcgtctggagcgcatcatccagagcgcgatgaagcagtcccacaaggccctccttcctcgcctcatccccgacgtgccctttgcccagctccttgagatgacagcggactatgacctgcggctcatggcccactgccgtagcacggtcggccccgagcgccacaccatcgatcacttcttccgccccgaggcgaagacgctcctgatggtcgggcccgaaggagacttctccgtcgaggagatcgaggaggctacccgtcgcgggtgccagcccatcaccctcggagcgagccgcctgcgcaccgagaccgccagcctcatcgccctgcaatggctacacacactcgatatgaccagccagcgtaggcccacgacacacgagaaataatacacgaaataatcccttatcaataactcacccttatggcacagagagaaatcaaacttagccttgtctaccgtgacatgtggcagtcctcagggaagtaccagccccgcaaggaccagctcgagcgtatcgcccccgtcttagtcgagatgggctgcttcgcacgcgtcgaaaccaacgggggggccttcgaacaggtcaacctcctctatggggagaaccccaacaaggccgtccgcgccttcactaagcccctcaacgcagctggcatccagacgcacatgctcgaccgtggtctcaacggcctgcgtatgttccccgtccctgctgacgtacgtcgcctgatgtacaaggtcaagaaggcccagggtgtcgatatcacccgtatcttcgacgggctcaacgacccccgcaacgtcatcccctccatccactacgcgaaggaagctgggatgatcccacaggctacgctctgtatcacccactcccccgtccacaccgtcgagtactacgctgacctggcagaccagttcatcgctgctggtgcccccgagatctgcctcaaggatatggcaggtatcggccgtcctcgcttcctcggccgtctggtgaaggctatcaagaccaagcatcccgaggtcatcatcgagtaccacggtcactcaggccctggcttctccgtagcctccatgctcgaggtctgcgacaacggcgctgacgtcatcgacgtagctatggagcccctctcttggggtaagatccacccagacgtcatcaccatccgcgagatgctcatcgacgctggctacaaggtcgctgacatcaacatggacgcctatatgaaggctcgtgccctcacgcaggagttcatcgatgacttcctcggctacttcatcaacccctccaatatgctgacctcttcgctcctcgtaggctgcggtctgcctggcggtatgatgggctcgatgatggctgacctcaagggcgtacacgctggtatcaacatgcacctgcgtaagaagggcgaacccgagctgagcgtcgacgacctgctcgtccgcctcttcgacgaagtcgcctacgtatggcctcgcctcggctatcccccactcgtcacgccattcagccagtacgtcaagaacgtcgctctgatgaacgtctacaacctcatcatcggcaagggccgctgggaggctatcgacaacaatacgtggggtatgatcctcgggaagtctggccgtctgccaggcaagctcgatcaggagatcatcgacctggcgaaggaaaagggcttcgagttcaccaccgaagatcctcagctcaactaccccgatgcgctggataagttccgcgctgagatgaaggagaacggctgggagctcggcgaagacgacgaagaactcttcgaattcgctatgcacgaagctcagtaccgcgactacaagagcggcgcagctaaggaacgcttccaggctgagctcgacaaggccaagaccgacgccctcgtcaagaagggctacagcgccgaagatgcagtgaagatcaagcgccagggtaccgagcctatcgaagctcctgcctctggtcagatcatctgggaggtcgatcccgaagactactctacggctcctgccctcggtaccttcatcaagacgggtgagcctctctgctacatccagacgaccgcaggctacttcgagcccgtcctctcgaacttcaccggccgcctcgctgaggtagctgctcagggtgctaacatccgcaagggtgaagccctcgcttacgtccgccccgctgagaaggaagagctcttcgtagagagcgaacccgaacgtctgcgtcgcgtagagcagctcgaggaagttcgccacgtcatccgtgctcgccgcgctaagaagtaagcgacaccgcccatagggcaaccactcctctcgggggctacacccagcacttagctgatgatgtagcccccgagtcttatctatccctaccataaagccacgccctttcgcgcgcgcgtaaccttatatatactataccttcccacacaccccttcacggctccctccgctaccttcccagcacgaccgagtaccttcatagggaccgcgcaccacgcacacgccccacacagtcctaccagagtcaggcgacacactgcctctctcgccctcctccgccacacacaccaccgagggagaacgcaggtacgagccatcaccgacgaagacgaccaataaagaccaccacccctaccttgccctactacctttgtatcgctccccaaggtaggcggagcgcccccagagaggggttgtattcctctttattgattgacttatgtacaccaccattccgcagccgaggctcctcaccttagccctcctcatcgggctctatggctgtgccgcacaccgccgcacgacacacgagagcacgaccgagagccacaccacgagcgacctacagcgcaccctgcacaccacccagcaggagcacgccctcgacaccctcacactggacctcaccgaggtcgtgcagctcctccctccgcacactgatactaccgcctcctccaaggcgaagggcgcaggctgggtagcacactaccacctccgacagatcgggcggcatcaggcgaccaccacgggcgctctacgggaggcagatagccttcgctccacgacccacaccacggataagggcaccacctcgcataaggtaccagccagccccttacatcccttcgccctcggcgtcacccttcccctccttctcggagccgtctaccttacttataggaggaccaagcgatgaaacccaccgacatccgctacatcgtcgtgcactgcagcgccacgcgtgccagccagtcttattcgcccgaagccctggagcgtgaccatcgtgcccgtggcttccgctcggcaggctatcacttctacatccgtcgctcgggtgctatcatccctctgcgcccgcttgagcagataggtgcccacgcacgaggctacaaccgctcgagctacggcgtctgctacgaaggtggcttagatgacacgggccatccagcagatacccgcaccgccgagcagcgcacggccctccgtcagctccttgagcacctccacacactcgccccgcaagctaccatcctcggccaccgtgacctcagccccgaccgcaacggtgatgggcatatcacgcccgacgaatggatcaagctatgcccctgcttcgatgcccagagggaatatcacgacatctccatcagccccgtaagccatgcaaccgaataaatccaaggcgacgctccagctcgtcatcgccaccctgctcagcctcttcggcatgctcctcctcggtgcagccttcgtcaccgccccacctggggagattcactccagcgtcctcattgcttacggcgaggtgatgaccttcgctggcgccctcttcggcatcgactaccactaccgccggtagtcgatgcccacgcctcgccacccacgtcacctacctgccacgctctcaccctcgccataccacccgcgcccccaccccaactcctcagcatactccacccgatcgccacgctccaccggctcgccatactcgaccgctacatacgcacctcaccacacccgacctcctccccttcatactctacctctatatatgcacctcgcacccgcctcctaccgcacgttctcacccagccctctgcagccctctccacccttccgtacagctctccacccctcttccgcacgcactcaccctatcctcagcacctcacagccatccttctacactcctccccacccctcttccgtgcaccctccgctcccccttccgcggaaaagtttgcactcccccgcctaaagcaagcagtaacccacctgtggaaatcttttgtcccaaaagaagaagaagacttatcctcaacatcttaccccgacgacatcgtgtggataactctgtgagtagctctgtgcatagcgaagagaaggcttgatttataagcccttatgccgatgcctccttacccccctcccgaggaaggtggtaatcgcttgagaacaaaacccatagaattagtatgagaaaagcaagcctcaaggccgtttttttttctccgcacttttggcaaactttgcaccagataagaggtcacacaagacaccccctacgacacactatactactaatgtatagcacattaagggaaaaaccaccttgtggataacctcctcaccccatagcaactgaggcccagcagcacgagcgcctatcaccgcgcccgacacccccgcttggctcctaaatatagtaatgcccttggtccacgactacgtaaggcaacccctcatgcaaacgacaactcctccttcttcaggggagcagctctggaagcaatgcctccagatcatagctggctcctgtgacccccagacgctccagcgctggttcgctcccatccgcccgctcggcattgagacgcgcgaggatgagcaggggcgtttcaaagcgctcgtgctcgaggtcccttcgaaggcgttctacgaggaactcgtacgcacctatgagaccctactcgtacgagctcagaacgagatcctctctcctcaagggctcgagatctacctgacacccgctcagacggctcagccagcacctcagcctaagctggcgcgcacgcaagactatacgtcgcacctcagtgccgacctccgcttcgagactttctacgagagtgcttgtaaccgcgaggccctgcgcatcgccgaagctacggctgcacgccctgggcaggctccgctgaacttcatcttcatctatggccccagtggcgtagggaagacccacctctcgcaggctattgggcagcgcgccatggagctccaccccacgatgcgtgtctgctatgtgtcgagctctaagtttgaagcgcaattcgtccgtgacagcctgatgcgcggtcccgagcgtggtatgttcgtagacttctaccagcagatggatatgctcatcattgacgatatccagggactcatcggtaagacgaagacgcagcaggctttcttcgatatcttcaatcacctctacctccttggcaagcagatcatcgtcacctgtgacgtccctcctgtggacctcaagggtatggagacgcgtatcatgacgcgtatccagagcgcgatgatgctacgcattgaccgccccgatctggagcttcgccgcaagatcctccagcgccgtgtcgctgacagcggtgtcgagctcggagaagagtgcgtagagttcatcgccgagagtatgcaggacaacgtccgtcagctcgagggggctatccgtacgatcatcacgcactcgcagttctccgatcatggtgcagtagacctcgaggccacgcgccgcatcgtcgggggtaccgtctccatcgagcgccgtgaggtgacgcccgagtccatcctcgataccgtctgctccgtcttcggcgtcgagaaggcacagctccgcacaccctcacgtaaggccatccttgccctgccccgccaggtcacgatgtacctcgtgaagaagcacaccagcgcgtcctacaatacgattgcccagctgctgaaccgcaacgaccacacgacgatcatgcacggctgcaaggctatcgaaggccgcctctccctcgagcccgctctcaaggagcgcatcgagcaggtcgaagctaccctcttctcttaaagcacacacctattataaaagcagcggcccccacctcacgattgaggtgggggccgctacttttttgtttctgctacgagtgctcgtcttacttcaacacgtggtagccgatgagatcctgtagcttgacaacaagccaagcgatcccgaagctaatgaagtcggaaggtttagcggcgggagggggtgcagataccgcaactaccaccgcccttggcgcaatgcttgcagtaacggcagttcttacaagcggtacagtacttcttacccgtgcagcgaccgccttcggtagcatgcgaagaggtgcaggagagagacgaagcagcaaggagggagaaggtgaatagagagaggagtaatcgacgcttcataaagagaaataggtctaagcaatataacccaagaggcggagctatagtgtggggagaggaaagctatactgatcgctgggcattcctatataggaacgagcgtgaaccagtactgctccgaagacgaactaatagtggtccgacgacgaagctatatagcttcattccactatgcagtagtgcttctgagcaccacacgcgtggtgatgccacagagatgcggaatgagcgctggagaaaaaaaagaagaaggagaccataccacgggatggtggtacagtctccttccttagggttggatagctaagtgcttaccagctggccttcttcaccccagggatgagaccggcagaagccatctcacggaactggatacgagagatgccgaactggcgcatgtagcccttgggacgacccgtcatgctgcagcggttgtgcagacgtacgggagaagcgttcttaggcagagcctgaagtgcttcgtagttcccttcggccttgagctgagcacgcttggcagcatacttagcgacgagctttgcacgctttacttcgcgtgccttcattgattcctttgccatagtatttagttgcctttcttagcgttcttgaatgggaggccgaactccttgaggagtgcgtaaccttcttcgtcagtctgagccgaggtaacgaacgtgatgttcataccgaggatcttggtgatgccgtcgaggttgatctcagggaagatgatctgctcgctgataccgagggtatagttaccacggccatcgaacttgctttcgatccccttgaagtcacggatacggggcagcgcgatacggatcagacgctcgaggaactcgtacatctgctcgcggcgcagggtaaccataacaccgataggcatcttcttacgaagcttgaagttagagatgtccttcttcgaaaccgtagcaacagccttctgaccggtgatggcagagagttctgcgatagctacgtcgatgatcttcttatcagccgtagccataccgaggccctggttgatgacgatcttcttcaggacgggcacctgcatgcgagactgataaccgaactgctcgatgagggcgggaacgatgcgttccttatattcgttcttaagacttgcagtattgctcattacttaatctcctctcctgactttttggaataacgtacgagcttcccttcgtcgttgagacgacgaccgatacgcgtagccttacccgtcttaggatcgacgaggttgagcttagcgatatggataggagcttccttcttctcgatccctccctgagggttctttgcgctgggcttagcgtgcttagcgacgatggctacgccttcgacgatagcgcgctgcttgtctacgaggacttcaagcacacggcccgtcttccccttatctacaccgctgaggacgacgacctggtcgcccttcttgatatgtaacttactcatttcttctttcgtctttaagggttagaggacttcaggcgcgagagaaacgatcttcatattcacggcacgcagctcacgagctacagggccgaagatacggctaccacgcatatcgccagcagcattgagcaggacgcaagcgttgtcatcgaagcggatgtaggagccgtcgggacgacgaacttccttcttcgtacggacgatgattgccttagatacgacacccttcttcaggtcagaagaggggatgacgctcttgacagcaacgacgataatatcaccgacagaggcatagcgacggcgcgtaccgccgaggacgcggatacagagggcttcctttgcaccgctattgtctgctactacgagtcttgattcttgctggatcatatactacttagctctttcgataatattgactaatctccatctcttggtacggctcaaagggcgagtctccatgatacggaccgtatcaccgatgttgcactcgttcttctcgtcgtgagcatggtacttcttcgtcttgttgacgaacttaccatagatagggtgcttttccttccacttgacagcgaccgtaatggtcttgtccatcttattggaagaaacgacgcctacacgttcttttcttaatcttctctgttccatcgggaggacacattaattgttgttgagttcgcgctcacgaaggatggtcttcatctgagcgatcgtgcggcgcatgcggcggatctcagcagggttgtctgcgggggtcacagcatggtcgatgcacttcttgttgtaagctgcctcttcggctactacacgctcctgtagctcaggcgtagtgagcgccttgatctctgctaatttcatctcttctattacaggttagtgttagacatatcgtagtcgcggcggacgacgaacttcgtcgtcacggggagcttctgtgcagccaggcggagagcttccttagcgatctcgaaggataccccttcgatttcgaagagcatacggcctggagttacgttagccacgaagccttcgggcgaacccttacccttacccattcggacgtcggcaggcttcttggtgataggcttatcggggaagatacgtacccatacctgaccctgacgctgcatatagcgagtcacagcgatacgagcggcctcgatctgacgaccggtgatccagcgcgtacccagagacttgatcccgaaagaaccgaaggcgagctggttgccacgctgggcattacccttagcgcgacccttctggactcttctaaacttagttttcttaggttgtaacattgctgtcttctgttcttatacgttagcgattacccccacgtctgccaccacgagcatcacgacggccatcacgacgttcgcgaccgccttcacggcgaccaccatgtcctggctgagggttggtgaacgaaggagcgaggtcacgcttgccgtagacttcacccttgcagatccacaccttgataccaaggataccgaccttcgtcagagcttcagcctgagcgtagtcgatgtctgcacgaagcgtgtgcagaggcgtacggccttccttgtacatctcggagcgggcgatttctgcaccattcagacgaccagagatctgtaccttgatcccttctgccccaccacgcatagcagcgccaatggcacccttgactgcgcgacggtaagcgatcttcccttcgagctgacgagcgatgttgtcagcgacaatcgcagcatcgatatctggacgacgaacttcaaagatgttgatctgaacatccttgttggtgatcttcttgagctcttccttgagcgtgtctacatcctgaccgcccttaccgatcacgataccggggcgagccgtgcaaatcgtgatagtgacgtgcttgagagcacgctcgatgacgatacgagagacacttgccttagccagacggacgctcaggtagcgacgcagacggctatcttcaagaagcttgtcaccgtacttacgaccgccataccagttggaatcccatccacggatgtatcccaaacgattgcttataggattaatcttttgtcccatctggtttagttctctttattggttattgaatcgacaaagatcgtgacgtggttcgaacgcttacggatacgatagccacgaccctgaggggcggggcgcatacgcttgagcgtagcagcaccatcgacgaagatgcgggagatatagagctcaccgtcttcggccttgcgtccgttcttctcttcccagttagcgatagctgagcggaggagcttctccacgcgagcagcggcttccttgttagagaacttgagtaccccaagagcacgacctacttccatgccacgcacgaggtcagctacgaggcgcatcttacgaggcgacgtagggacgttgcggagcgcagcgaagtacgtagacttcagggcttgctttctttcttcggctgatattttctttcttgcacccattgtttcttttcttacttaaaggtctgaattacttccagccgaattacttcttcttattaccgccatgaccacggaaggtacgcgtgggagagaactctccgagcttgtgacctaccatgttttcggtgatgaagacggggatgaacttattcccgttgtgtacggcaatcgtatgaccgacgaagtcagggctgatcatcgaggcgcgagcccaagtcttgatgacgaccttcttgccggattcattcatcgccaagaccttcttctcgagcttcaggttgatatatggacctttctttaatgaacgactcataattctttttgattaatcagttacttcttacgtctctcgatgatgtacttagacgagtgcttcttaggagcacgagtcttgagacccttagcgtagagacccgtacgtgagcgtgggtgaccaccagaagcgcggccttcaccaccacccattgggtgatcgacagggttcatgacgacaccacggttgtgaggacgacggccgagccagcggctgcgaccggccttaccggagcgctcgagagcgtggtcggagttgcctacggcaccgatggtagccttacaagcggagaggatacggcgcgtctcgcccgaaggcatcttgatgacggcgtagagaccttcgcgagaagtaagctgagcgaagacgccagcagagcggaccatcttagcgccctgacctggacgaagctcgatgttgtgaatgatcgtaccgacagggatgttagccagtgggaggctgttccctacctcaggcgcagcttctgcacctgacatcactttctgacctacctgcagaccgttgggagcgaggatataagccttcgcaccatcagcgtagtacagcagagcgatgcgagctgtacgattgggatcgtactcgatgctcttgaccgtagcagggataccgtccttatttctcttgaagtcgatgagacgaagcttctgcttgtgaccaccaccgatgtagcgcatggtcatcttaccggtgttgttacgaccaccggacttcttcttacctacgacaagggacttctctggtgcgctggcagtgatgttatcgaacgcaccaataaccttatgtctttgccccggcgttgtgggcttgagtttacgtattgccattgttgaacttagatgttagcgtaaaagtcgatggtctgacccttctcaagtgtaacgacagccttcttaaacgcagcgaccttgccgcggatgagtccactcttcgtatagcgagccttgcgcttaccgctataattcacggtgtttacactctcgacctttacattgtacagcgcctcgatggccttcttgatctcgatcttgttggcatcaggagagacacggaagacgtagcgttcagcagtcttctctgtcagggcagttgtcttctcggtgataaccggcttgatgataattcccatgattcgtttctcctattgattatgccttaaactgttcgttgatcacagcaacagcagcctcggtgaggatgagcttcttgcagtcgagcaccgagtaggtgttcagctggaaggcgttcatcacgcgagcagtgcggaggttgcgtgaagagaggacgaggttgtccgagagagcttcgacgacgaagagggccttcttgtcagcgacctgaagtgccttcgacagagcgacgaagtccttagtcttgggggcagcgagctcgaagttttcgactacgacgatctcctgcttctgagccttgtaggtcagagccgagcggcgagccagagcctttaccttcttgttgagcttgaagccatagtcacgtggggtaggcccgaagacgcgaccaccaccgacgagtacgggagagttgatatccccacggcgagcaccgccaccgcccttctggcggatgagcttgcgggtactacccgagatttcgctacgctccttagacttgtgcgtaccctggcgctggttggccaaaaattgctttacatctaagtagatggcgtggtcgttaggctcgatagcgaagatagcatcatcgagcgtgatcttacgaccggtatcttctcccttgatgttatatacactcagttccatttacttttcgattacaacgattgaacctttagcacctggcacgctacccttgaggagaaggaggttgtgctcgggcattaccttgatcacttcgaggttctgaacggttacacgctcattacccgtctggcccgccatacgcgtacccttgaagaccttagcaggatacgaacacgcacctacagacccgggagcacgaagacggttgtgctgaccgtgcgtagcctgaccgacaccgccgaagccgtgacgcttgactacaccctggaatcccttacccttggaggtgccgacgacgtcgacgaataccgtcccttcgaagaaattcacgtcgatcacatcacccagattatactggctgcaatcgaaccccttgaactcggccaagtgtcgcttgggggcaacgccagccttctggaagtgaccctgaagaggcttggacgtgtgcttttccttagcatcaacgaacccaagctgaagtgcttcatagccatccttttccagagacttgatctgcgtcaccacgcaaggacctacttcaataacagtgcatgggatgttcttcccctcggcactgaacacggatgtcattccgattttctttcctaataaacctggcatttcagtttcgtattaataatcacaccttgatttctacttctacaccgctggggagctcgagcttcatgagagcatcgatcgtctcagccgtggagttgtagatgtcgatgagtcgcttgtaggagctaagctcgaactgctcgcggctcttcttgttgacgaaggtcgagcggttcaccgtgaagatacgcttgtgcgtgggcaggggaattggtccgctgactacagcaccagaggccttgacggtcttgacgatcttctctgccgacttgtcgagcagggtgtgatcgtacgacttcaacttaattctaatcttttggctcatatctctgttatagtactatttacttgatgagatctacacggccgcctacttcctcgaggacctggcgagcgatagaagaggatactgcttcgtagtgagagaaggtcatcgacgaggtagcacgaccagaagtgatcgtacggaggctcgtcacgtaaccgaacatctctgccagaggcaccttagccttcacaaggcgtgcacccgaaggagtggtgtccataccttctacctgaccgcgacgcttgttgaggtcaccgatcacgtcacccatgttttcttcaggcgtatcgacttcgagtctcatgataggctcgaggagaacgggacctgcctgagcagaagcgttcttgaatgcctggatagcacagatctcgaaggagagctggtcagagtccacggggtggaacgaaccgtcgaggagcgttaccttcagcttatccagcgcatagcctgcgaggacaccgttggtcatagccttctggaagcccttctgtacagaggggatgaattccttaggcacgttaccgcccttgacttcgtctacgaactgcagatcgccttcgaagccttcgtcggcgggctctacacggacgatgatatcagcgaacttaccgcgaccacccgtctgcttcttgtagacttcacggagctcaacgggcttcgtgatagcttccttataagatacctggggcttaccctggttagcttcgaccttgaattcgcgcttcagacggtcgataatgatctccaggtggagctcacccataccgctgatgacggtctgaccggtctcttcgttggtctgcacacggaaggtggggtcttcttcggcgagcttagccagaccgacacccatcttgtccatatccttctgcgtcttaggctcaacagcgataccgataacgggctcggggaagtcgatagactcgaggatgataggagcttcttcggagcagagcgtgtcacccgtacggatatccttgaagcctacaccagcaccgatgtcaccgcagccgatgacttccatggggttctgcttgttggagtgcatctggaagaggcgtgagatacgctccttcttgcccgagcgggagttgtagacgtaggagcctgcaggcagctcaccagcgtatacgcggaagaagcagaggcgacctacgtaggggtccgtagcgatcttgaacgccagagccgtcagaggcgagctggggtctaccttacggacgatttccttttcaggatcatcggggtcggtaccgatgacttcgggggtatccatagggctgggcaggtaagctgcgacagcgtcgaggagggtctggacacccttgttcttgaacgaagaaccgcagagcatggggttgatcttcatcgcgagcgtacccttacgcagggcagcgcggatctcgtcttcggtgatcgtagagggatcgtcgaagtacttctccatgaggacgtcatcgcagtcagcgagcgtctcgagcatcttatcacgccattcttcggcttcagcctgcagttcagcagggatgtcgatcgtgtcgtagtgagcacccatcgtctcgtcatcccatacaagagccttcatcgtgacgaggtcaacgacaccgcggaaagtttcttcctgaccgacggggatctgaatggggcaaggggtagcaccgaggacggccttgatctgacgtactacttcaaagaagttagcaccggagcggtccatcttgttgacgtagcacacacggggtacgcggtacttgtcagcctgacgccatacggtctcactctggggctgtacaccaccgacagcacagaacgtagcgacagcaccatcgaggatacggagcgagcgctctacttcgacggtgaagtcaacgtgccctggggtgtcgatgaggttgatcttgtacttggtgttgtcgtagttccagaaggtagtcgtagcagcggaggtaatcgtgataccacgctcctgctcctgctccatccagtccatcgtagcaccaccatcgtgtacttcaccgatcttgtgggtcagacccgtataaaagaggatacgctcagacgtagtcgtcttaccggcatcgatgtgggccatgatgccgatatttctcgtgagctctaagtgtttgttgtcagccattgtcttttgctattcttagaatcggaagtgagcaaatgcgcggttggcttctgccatacggtgcatatcttccttgcgcttgaaggcggcaccttggctattgaatgcatccacgatctctgcagcaagcttatctgccatggtcttaccaccacgcttgcgagcaaagaggatgaggttcttcatggagatagattccttacgctcggcgcggatttcggtaggcacctggaaggtagcaccaccgatacggcggctcttgacttctacctgaggagtgatgttgtcgagggcagccttccagatctccagggcagacttgtcttcctgctggatcttcttgcctacaatctcgagcgcggtgtagaagatatcgaaggcgatgctcttcttaccgtcgtacatcaggtgattaacgaacttcgtcaccttaacgtcaccaaatacgggatcagggagtacctgtctctttttgggtttagcttttctcattgcttaatgtaaattgcgtttctgtcgattggttgtgctgtgatcttacttcaacgctcccgctggagcatttactcaaccttgatagcctatccaacgaactcaagaaacttggttctattgactcttagcttggcggccctatacattatatatatatgtggcgggctcgccaggtgagagctgcacgagctctcgggggttaggatttttcgccggagggagaattacttcttaccctttgctggagcagctgcctgaccgggcttaggacgcttagcaccatacttggagcgacgctgcagacggccattgacaccagctgtatcgagcgagccacgtacgatgtgataacgtacccctgggaggtcctttacacgaccaccacgtaccagcacgatgctgtgctcctgcaggttgtgaccttcacctgggatgtaggcattgacttccttaccattcgtcaggcggacacgagcgaccttacgcatcgcagagtttggcttcttaggggtcgtcgtgtacacacgcacacagacgcctcggcgttgggggcaggagtccagagcagggctcttacccttctcgacgagtgactcacgtccctttctaaccaattgttgaatagttggcatttcgtttctacttatgtttgaataacttatctactctttagtagtcgcagtacacaccacaggcatataccacgggtgcacaaaggtacacataatctgcgaatatacaatactatacaattgattttgtggagaaagcccgtagagatatgcagctatagcttgagtagaaaaggccgagggacctcaggcaaattcgcccaaagtccctcggtaggggaagcgaagaccagcggaggtcttcagctatgattaagcttgtgcttagcggagcgtaccgtcctgagcagccttcaccatcgccttgctggggaggatgtagacttcgacacggcggttttcgcgacggccagcagcggtagagttgtcagcgacaggctcgtagctacccttaccctcgaccttcatacgcgaagaagagacaccctgaccagcaaggaaagagcggacgcttgcagcgcggttgtaagagagggggttgttcacgcggtccgtacccgtgttgtcggtgtgaccgatgatcatcagatccgtatcgctgtgctcagagaggttagcagcgaacttacgcagggtagcctgtgacgtagagctcagcgaagccgaacccgtagcgaagaggataccgctgtcgaaggtgacgcggatagcctgaccgtcgttgacagactcgatcttagcgtccttgacgtcgcgctccagttccttcttctgcttgtccatcttctcaccgatgagcgtaccagccgtaccacctacgacaccaccgatgacagcaccgacagcagtattaccaagtacgcgaccgacaccagcaccgatagcagcaccaccagcggcaccgataccagcgcccttgacagcgttgcttgcaccacagcttgagaggacgagtgcgccagccaggaaggctgccgcgagagattgcttcttcataattatatactacttattaatttaattctgtttctctgaccgacacctttgctcttagtcctgagcagcgcgggcattgaaatacttcataaactgaattcgctcaaaaagacttgggtcagctacggctccgtagctcagacgaccacgtagctccgagaggctctgatagccgtgctcgatcatccagtggcgaagacccttcagcgcctctgcgatagcagtggcaccctgcttatagaccgccgtacacatctgcgcggtatcggcacccgccaagagcaccttcgtcagctcctcccaagtgtagatccccgtcgaagcagagatacccacattggggacgcagccacggatcacgcccgtgaagcggagcgtctcggtgaagtcaccctcgcgagagaagacctcaccgccgatgagctgctcgcgattcagatcgatgtcgatctggtaggagcggttgaagagtgtcacagcggcagcacctgcagcacggagcttatcgacgagcatcggcaggttcgtgtggtagcgcgagagcttcacgatgatagggagccccttgccagcgagcgccgtgacgatggagacgtagtaagcctcgatctcagctggatctgcgaagagctccgtctcgaggcgcatcacattgacttccagggcatctgcccctgcatcacgcagacgctctgcaaattcgacccagctacccgcctcggtgcagttgatactggcgatgaccggcacagtgagcttagccttcgcctcgcgcacgatacgtatatagtcctcgatagcttcgctccgcacataggatgagatatagtcgttagcctcggggtagtcattcttagcgacgaggtgccctgtctgcatcaagatctgctcttcaaagagcgacttgaggatgacagcacccacgccagcctctaccaaggcgcacgtacgatccacgttgcgggtaagcccagagctcccgagaatgagagggctctgcagtgtgagcccagcaaacgaagtgcttaaatcgaccatcatagcaagtccgaattgtgaacaaatatgaacatagcgtccaagcaaaggtaagattatttcacaaataagcgtataccttcgtcatatcggcagtactttctccaaaaatcgcacgccacaagctccagtaaaacgcaccactcccccagcttcgcacccactggagaaactatattccccacgaagcaccgatatacacactataataaggtactactccctccccgagctatacgccccctcacactacggggtgaaccccactccaccactgcttacccacgaaagcaatacaagaataactccagagctgcacagagaaaaaacccgatcccgtagcgcaaaaccttcgtccacgcacgtagtctttagagccaggcacgtagattttaagagcctcgtacgtggattttagagccacgcacgtagacttattaaaatccatactccttcaccagtcatttctttagataaacgcaagttttctcgcacgagacaaaaatgcttcttctatagaatgcccccagagagagccataagattaaaccttattcaaataaaacacactaacctatatagagcgatcattcaagggtttatagcgctgttacacaccccctcctcccgaggcaaaaatccccgctctatgggtcgacgggaggatcactatgagaattataggaaatacattcgcaaaatcagcggaataaagtcgcttaaaaagcgaacatattgctgagagctatgttattatttcggaggaaaatggtaacttcgcacattaactcgcttaattttttaaattatatgaattattatggcaccaaaagaaaaaaatccacatctcacccgcatcgggatattctatgacggcaactatttttggcacgtcagtaccttctactatcagttccacgaacgaaaaagccgcctgagcgtcgggggcctacaccgcttcctgaagtatcagatcgcccaacttgaggggacttctcccgagctgtgcaagatcgtagacgcgcattacttccgtggacgcctgtcagcagccgaggccgcgaaggcttcgggcgatgtgctcttctatgagcgcctctttgacgatgtactgaattcggagggtgtgatgatgcaccacctgcccctctctcgcacgggcaagggcaataagaagaaggagaagggcgtcgatgtgctcttcgctctagaggcttacgaacgtgcattgcagaatcagtttgacgtcgtcgtactcatcgctgccgatggagactatatccccttggtacgcaagctccacgccctcggtacccgtgtgatggtccttggctgggatctcgagcacgaaggtgacggccgccgagacaacacgacgacctacacgtcatacgagctcctcgaggaagctacctaccccgtgatgatgaatgagctgatcgatagccgcgccttccgtagcgaccccatcgtcaatggtctctttgtgaacaagggtcagagcgaggagcgcaatcgtgaggtcaagggtcgtccctaccaagccccacaggcgcgtacacgccccattgaccccgccacggtaaagagcgccgaggagcccacagccctcgtcaaggcagagactgacgctcccgacaagaccactgaaaccgtacagctcgccacaggccccgagcccgagatcacgctgagcgtacacgactcgctagagacgcccgaggtgaaggtcatcggtcatatcgatctgcccgagcacaagcccgccctcgtcctcggcgaagagcttcacgacggccttgtccgtggccagatcaacgccctcaaggcaggctttggcttcatcgacgtcggtgtaaaggagaatgccttcttccactacaagagcctcaacggcatcaacttcaatgacctcctcgtcggggatatcgtcgaggcacgcctcggccgcagcgagaaggatcagctcgtcgcctcggatgtagccctcatcgaagaatagtcgtagcgcacagctccgaccttcctaaaatatttaagcatcgctccacggtaggatcccctgccgtggagcgatgctttttacctttaccctgcgatgcacataccccctaccccgctcacagcgtgcatattaagcatacagcttacgcgcgcacggctatagtctcgtttgcacttttgtccgtgattacatacatttgtttcagtgaatagaatggctcggaagccacactccctgcgccttatgccgatgcacgcgacagggggaagccaccgaggaatttgggtcgataactacgacccctcacccatcaagacttcaccacatgaacggaactattaacgggacggagcagcgcccggggatcgtcacagctatatcccccgacatcgtgaccgtccagatccagcagcagagcgcctgcagcggctgccacgcacgcgacctgtgcgtgagctcggagtgccgtgagcatctgctccagctgaagacctacggacagcacttctctatcggagagcaggtcctcgtcgtggcccgccggagcgtaggacgcctggcagtcctcctggccttcgtcctgcccctcctcctcctcgtcctcacactgagtatcgcacagacgttcctcgccctcagcgaggctgcggctgtgcttgtcgctatcggcctactcagcctctactatctcgtgctctacacccagcgccgtcgcctcgaggggcgtctcgtccttatggtagagcccatcaccccgcaccacgaatagcaccctacccctatgtatatcactatcatcgtcctgaccctcatcggtgtgatcggcgccggcttgctgtacgtcgtatcacgcaagttcgaggtcaaggaagacccccgcatcgcggaggtcgctgaagtcctcccccaggccaactgcgggggctgtggcttccctggatgcgccgccttcgctggcgcctgctgtaagagtgagaccctcgaaggactcttctgccccgtcggcggtacgcccgtcatggagaaggtcggaggcatcctcggtgtcgccgcccagaagcaggatccgctggtcgctgtcgtgcgctgtaatggtacttgcgacgcgcgcccacgtaccaatatctatgacggtgccagcagctgtaccatcgctgccgcgctctacaagggcgataccgactgtagctggggctgtctgggcctggcggactgcgtccactcgtgtaacttcgacgccatgtatatggaccccgagacgcgcctaccggtcatcctcgaggacaagtgcgtagcctgcggcgcctgcgtcaaggcctgcccgaagtacatcatcgagctgcgtaagaagggtcccaagagccgtcgcatcttcgtcagttgcgtcaacaaggataagggtggggtcgctaagaaggcctgtggcaatgcctgtatcggctgctcgctctgcttcaaggagtgtaagttcgaggccatcaccatagccgacaacctctcctacatcgaccacaccaagtgccgcctctgccgtaagtgcgtctccgtctgcccgacgaacgctatccatgaaatcggcttcccccctcccaagcctaaggaagaggctcccaagaaggaggccgaagcccccacacctactccggcacctgcagcacctacgcctacagagacccccactcccgcccaatcgtagacctcagccatacacgtttatgcttcgcacattccgcctcggggggattcacccacccgaaaacaagctctcagctaagcgccccatcgaggagctcccactgcctcgtgaggtcatcatacccatcggccagcacatcggcgcacccgccaccccgaccgtccaaaagggcgacctcgtcaaggtaggtaccatcatcgccaagacgtctggcttcgtatcggccaacatccactcctccgtcacaggaaaggtcacaaaaatcgacagcttcttcgatgcgggcggctacaagcgccccgccatcgtcatcgccgtcacacagggcgaagaggagcagtgggaagagggcatcgaccgctccacgaccctcgtcaaggagtgcaccctcgagcctaaggagatcatcgaccgcatcagtgccgcaggtatcgtaggcctcggcggtgcgaccttccccacgcacgtcaagctctcccctcccccaggggcgaaggctgaggtcctcatcatcaatgccgtcgagtgtgagccttacctcaccagcgaccacgccctgatgatgagcaagtccgacgagatcctcgtcggcgtcgagatcctcaagcgcgccctcggcgtgagccgtgccgtcatcggcgtagagaacaataagaaggacgccatcctccgcctctcgcagatcgccatggactaccctggcaccgaggttatgcccctcaaggtgcagtaccctcagggcggtgagaagcagctcatcgatgctgtcctgcgcaagcaggtcaagagcggcgccctgcctatctccgctggcgctgtcgtacagaatgtaggtaccgtcttcgctgtctacgaagctgtacagaagaataagcccctcgtcgagcgtatcaccaccgtcacgggcaagcacctcgagaccccctcgaactaccgcgcccgtatcggtacgcctatcggccacctcatcaccgcctcaggcggcctgcccgaggacacgggtaagatcatcggcggtggccctatgatgggtaaggcacttctctccacggagatccctgtgaccaagggcacgtcgggcatcctcatcctcccacgtgaggagtccacccgccgccccatgcgcaactgtatccgctgcgctaagtgcgtcaccgtctgccccatggggctgaaccccgccttccttatgcgcgacgtccagtatgccgactgggatgctaccgagaagggctacatcgtcgactgtatcgagtgcggatcatgcagctacacctgccctgctaaccgccccctactcgactacatccgcaccggcaagcagaaggtatccgccctcatccgtgcacgcaaaagctaaccctgccctatggatcgcctcattatatccccttccccccacatccacagcggtgacagcgtcgagcgcaacatgtacgctgtgctcatcgcactcgctccagcgtgcctcgtctcgctggtgaccttcggcctcggtgccttcatcgtgctcgccgtgagcgtgctggcctgcgtcctcacagaatgggtcatcacgaagtacctctacaagcaaccctccaccatcggtgacggctcggccatcctcacaggactcctcctcgggatgaacctcccctcgagtctcccctggtggatcatcgtcatcggtgccatcgtcgctatcgccgtaggtaagatgagcttcggcgggctcggtgggaacatcttcaaccccgcactcgtaggccgtgtcttcctcctcatcgcctatcccgcacagatgacgctgtggcccaaggctgggcagtacttcagctataccgacgccgtcacaagcgccacacctctgggcatcgccaagggcatacaggctggtacacctggcatgagctgggatcagatccctgcgacctccgacctgctcttcggcatccacggaggtagcctcggcgaagtcagtgcgctggcactgctcctcggtctcggcttcctgctctatcgccgcgtcatcacttggcatatccccgtgtcgatcctcgctacggccttcgtcttcggcggtatcatgcacctcgtcaaccccgctctctaccccgcaccgctcttccagctcctcacgggggggatgatgctcggggcgatcttcatggctacggactacgtgaccagccccatgagcacccgcggacagctcctctatggcgcactcatcgggctcctgacgatcctcatccgactcttcggtagctatcccgaggggatgtctttcgccatcctcatcatgaatagcttcactcctctgatcaatatgtatatccgtccgaagcacttcggcgggcgctaatgctatgaagaagctcagttcgacactccccaacatgctcctctcgctcgggggcatctgcgtcctggtctctgggatcctcgccgtagtcaacaaggtcacgaccgcgcctatcgccgaggcagagatgcgggcgaaggtcgaggcaatacgtgccgtagcaccagcctttgacaataatcccttcgctgagaagctcatggtcctgcccgaaggcgagaccgacagcctcaccgtctaccccgcaaagaagggtagcgcactcgtcggcttcgccatcgagagctacacgcagaagggcttcagcggcctcatccgtgtgatggtcggcttcgatgccgagggacgcctcgtagacttctccgtcctccagcactccgagagcccgggcctcggctcgcgtatccccgagtggtaccacgagaagagcgagacgggcggcatacgtgacgtgcgtggcctcgatatgaaggcctcggctccgctcaccgtctcgaaggacggcgggaaggtagacgccatcaccgcagccaccatcagtagccgcgccttcctcgacgctgtgaaccgcgcttggcgcaccttctcctccctcgaaggcaccgccacagcacccgctacgaactctcaagaatagtcccccctatgaaaccacttgatatcattcgcaacgggatcgcgacggagaacccgaccttcgtactcctcctggggatgtgccccacgctggcgaccacgacctccgcactcaatgggctggcgatgggtctggccacgatgtttgtactcatctgctccaataccgctatctcgctcatcaagcacctcgtccccgacgccgtgcgtatcccgagcttcatcgtcgtcatcgctggcttcgtgaccatcgtgcagatgctcatgcaggctttcgtcccctcgctctacgcttccctcggcctcttcatcccgctgatcgtggtgaactgtatcgtcctcgggcgtgccgaagccgtagcggctaagcagggcgtgctccacagcgcactcgacggcgtgggtattggcctcggcttcaccctctcgctgacgctgctgggcttcgtccgtgagttcctcggtagcggctctatcttcaccctccaagtcctccccaagcagtacggcgctctgctcttcgtcctcgctcctggggcgttcctcgtcttgggttatctcattgctctgaagaataagctgagcgcaaagaagtaaatctcatgactcactatctcctcctcttcgttgcggcggtattcgtcaacaatgtcgtcctctcgcagttcctcggtatctgtcccttcctcggcgtctcaaagaaggtagacacggctatcggcatgggcgctgccgtgaccttcgtcctcgcgctctcgacgatgtgcaccttcctcctgcagaagttcgtcctcgagcccttcgacatggtctatatgcagaccatctccttcatcctcgtcatcgccgcactcgtgcagatggtcgagatcattctgaagaaggtgtcccctgcactctaccaagccctcggcgtcttcctcccgctcatcacgacgaactgctgcgtcctcggggtcgccatcctcgtcatccagaaggaatacacgcttctggagagcgtcgtctacgcgatctccatcgctatcggcttcacgctcgccctcgtggtcttcgctggcatccgcgagcaactctctcgcaccgagctccccgcctcgatgaagggcattcccatcgccctcatctccgccggtatcctcgctatggccttcatgggcttcagcggcatggtgaagatgtaagacacgcaatcctatccctcataaagccaaggggcagttcactcatcgtgaactgccccttgcttttgtatcaagcctaaagctatttctcctctgccttacccctctcatatcggaagtagtaagggaaggcatccgtgctacggatcaatttccggcgtctatatgatactactccatttctgtcgttcactgatttaacaaataatcggttaagtatagggagcacctcatgaggtaattctttccttagagaagtccaccgctctggacttatgtagtaacagggctcatgcatactatcattcagctctacatacatacgccatgtaaggttattatagatactaagatacctgtactgaagtagtgaaactaagaagaaatcagctggattaaccctataatatacctccctatacctggggatcattaaattcaaataccgcttaagatggcgcacagactccaaataccccgtaataatatcggagactgatccccatccgtccagtgtttgctgtagttcctcaatggatagcttaggcatacgaagctttaagtaccgttccattgcagccttcaacacctccccatcaacctcaggaatggtcacctcccaagtcacatacttatcgataaagctatgatctaagccatgatccaagtgcttcctcaacacgttgttgatgtattccttgtcgtatgccatgacaaagactacattattgaaagaggcattgcgatcaacgagcttcagtacctcaattatctcctctcctgtcaagcggtcgaggtcatcgatgacgacgtacactcgcctaccgatagaatatagagcagcattaatcgcttgctcgtccttctctgggagaaggagtgtcagtagactctccaaggggcgcgtccattcatactgtccaagcaaccctaagtgcttggtatatcgtccaagtaaaaagccgaagcctatgtagtacttggataattccttggcaaaagcatcaaagaagtcttcttgaatttgagatacattctttgagctgcggggattgaagcgaataatgatatctccatgctccttaactttattcatcaaaagattaataaaggagctcttccctttcccccactgagcaataatccccatagtcaatgattctccgctcaaatcaagcgaacttagatcttcgaaaagcaacccaaccatagaactaaagcccagccaatcatcacactctctttcaatagctacatcattttgaatggcctgagctcccatttgctcaagagcagcttcttctattgccccactgacgtctttctttttacgagctaaccatacgcaaacaacaagaggcaagaggaggaggtccgtccaagttgcacggaataccatccaatctcctaatggtattctccagaagtaaaactcggggcttagcctataataatagcaagggcttatcctatagtataggtaagctaccgccaaaaggagtagcccccaacggagctgtacgggtatgtaggtattcctatatcgcccaagcaatatgtagaagcaacagaccactaacaaacagacaaaagctccaaaccagtgcggagacagctctgcgatacaatgctcctgcacgaaggacaagagcttccgtatatacggatctaccatgaagaaggctgcaacggcaagggctatttggaaagctccacgccgaaagatagggcaagtagtagtcgttttactcatacgctgagataagtgagttggtattgaggttgtagcatcaagcggggacgctgtattgcaaaggtaaagaattcgcgctgggtattggagggcgcacgcatacagggtattagaccaggaaaataaacgcactacgccccgccttcgttggacgaaagcggggcgtagctatatgtacttggagtgtcgcggggacggcttacatcatgccgcccataccacccataccggggttcatagcgggcatagcgggagcatcctccttcttgtcggcgatgacgcactcagtcgtgaggaacatacctgcgatcgaagcagcgttctccagcgctacacgcgtgaccttcgctgggtcgatgacgcccgaagcgtagaggttctcgaactgatcaaggcgagcgttgtagccgaagtcaccttcgccatccttgacgcgctgcacgatgacagcaccttccttaccagcgttggcgacgatctgacgcaggggctcttcgacagcacggcggatgatctcgatacccgtcgtctcgtcttcgttctccccgacaaggccgtcaagggcgcggacagcacgcaggagcgccgtaccaccaccagggacggtaccttcttcgacggcagcacgcgtagcgctgagggcgtcgtcgacgcggtccttcttctccttcatctcgacttcgctgggagcaccgacgtagaggacggcgacaccaccggagagcttagccagacgttcctggagcttttcgcggtcgtagtcggaggtcgtgttagcgatctgtgccttgatctgagcggcacgctcgcggatggcttccttgtcaccagcaccattgacgatggtggtgttgtccttgttcacgctgatcttctcagccttaccgagcatatcgaggctgacagcgtcgatgctgaggcccgtctcttcgctgatgacgacgccatcggtgaggatagcgatatcctgcagcatagccttacggcgatcaccgaagcctggagccttgacggcgcagaccttcagaccaccacgcaggcggttgacgacgagggtagcaagggcttcgctgtcgatatcctcggcgatgatgagaaggggacgacccgtctgtacggtctgctcgaggataggaaggatctccttcagcgtagagatcttcttgtcgtagatgaggatatagggattctccagctgcgcctccatcttctcggagttggtgacgaagtagggagagatatagccgcggtcgaactgcattccttcgacgacctcgaccgtcgtctcgatgcccttggcttcttcgacggtgatgacaccttccttgttgaccttgcgcatagcttcggcgatgagctgaccgatctgctcgtcaccgttagcggagatcttagctacgtgctcgatcttctcgaagttgtcaccgatctcctgcgccatagagcggatctcagcgacgatcttagcgacagccttgtcgataccacgcttgaggtccatggggttggcacctgcggtgacattcttcagcccgacaccgatgatgctctgggcaaggatcgtagccgtggtcgtaccgtcaccagcatcgtcgttggtcttcgaagcaacttccttgacgagctgagcacccatgttctcgaatggatcttcgagctcgatctccttggctacggagacaccgtccttggtgatgtggggtgcgccgtaggtcttaccgaggataacgttgcgacccttagggccgagggttaccttgacagcgttagccagagcgtcgacgccgcgcttgaggctctcacgtgcctctatatcgaacttgatttcttttgccatgattgtatctgatatctgtatttcttacttagtgagaagggattagatcgtagcgagtacgtcggactgacgcatgatgaggtacttctcaccttcgtgctcgatctcggtgccagcgtacttgccatagaggacgacgtcgccagccttgaggaccatctcttcgtccttcgtgccaccacctacggcgatgacttcgccacgcaggggcttttccttagctgaatcggggatgatgataccgctcacggtcttctcttcttgggcagcggggcgaatgagtacgcggtctgccaggggcttaatgctcatgatctaagtagttatatgtgttgttttatattcttcgtttcgcttgggactggggtataaggctccccacccacgtcctctaccgagcaaggagcgtgccaaagcccagcgaagccccattctgcacacctcctgccaatatgacacaccgcccccacctactgctgtcagcgagtacgacattatatatcgagcgcacgaaggaatgggcgagcaaaggagcgaagagcagggataccgcctcatccattacaagacgcttgcaccgtgccgtacgctacgcggcgcatagcagtgcggcgtgagccctcgcctcttcgcaggtaaaaacaagggacaatagtggaatgacctcctatccgtgcgaagaaaagctgcgaacctatggtagataagcttcatctacgtacgtggctctaatatctacgtgcgtggtcattaggatttacgtacgtagtctttaagaccacgcgggtagacagaggaagatcactacgggaagctacttttttctccacggaaataccacttttcctcaggcggattctcttcctttgatataagccttcgctctgaattcgttatatttgcaggcagtagcacctcgcacaagattatgcagaccaacgagcgatatacccgtcggctggcgaccctcttcctcgggctcttcctgagtctcctggcgatggtcagcctacacgacttcagccaccgcgctgacgccgtgcaggatgtcgtgtctacagagggctacacctcccacgtgacgaagaccgactgctcgatctgtcacttcgtccataccccgttcttagctctcgccatcggcacgctgctcgcagcagtggctctcggcgtgcgcatcctcggggtgcgcttggtgcgccttgcccactcgatccgcagggatgcggtacagctacgggcccctcccaccttcgcctaaatcactcaccagaggccacgtgtagggtaatctttgccctgcctctacccccgcctatcacttatagcgtgctcccggcctgtatgggagtgctacgcttggccgtgtagctcgtggctacagctggctatatccgcgaagaggaccgctatgccatagcctcttcccgacccttcatccatatcatccttttcctacctatgtgctatctatcactggcaagatggcgcggcgtcctcctatctctggggatgctcctcgcccttgccctgggtgcatgccctgtacatgcccagagccgtagcctcatcatccaggtccttgacgatcgaactggagagcccctcccaggcgccgtcggccacatcggccgtcgctccatgcagaccgacctcaagggccagctgaccctcgccctcacggggagcgaggaggacggcctgcacgtccatctcatcggctatcacgaaggcttcatccctctggacaagctccgcagcacccccagccccttcaccctgcgtctgcgccctgaggagcgtgatctctcttcggtgaaggtcgtcggtacccgccgtcctgtctccgccaacgtcgtctccacgaaggtctctaccgagcgcatcgagcgtaacctcgggcgtaacctcgccgccctcctcaccgaggtcagcggcgtcacgagcctgcagacgggcacgacgacagcgaagcccgtcatccacggtatgtacggcacgcgtgtgctcatcgtcaataatggcgtccgccagtcgggccagaagtggggcgacgaccacgcccccgaggtcagcgtcgacgccaacgaccaggtccacgtcgtcaagggcgccgaagcggtagcacatggctccgaagccctcgcgggcgtcatcatcctcgggcagagtcctctcccctatcatgggcgtagcctgcaggggacgctggcgacgagcttcgccaccaacggccgtcgcttcaccgaggtagcgaagctcgaaggcgctctgcccttcctgccttcgctcgcttggcgtgcgcagctctcctacaccaatgcgggtgaccgctcgacggcgaagtacctcctcaccaatacgggcgtcaaggagctggactactcactcgccctcggttggcgcggcgaacacctctctctcgagagctacttcagccagtatcagaataagacggggcttcttccctcgggtcacctcaagaatgccaacgagatcgaggcgctcatcgagcgtggtcgtccgctgaccttccgccccttctcccgccatattgactaccctcaccacgacgtcctgcaccgcctgtggagcgtcaaggggcgctatgatgatgagcttctcggcaccttcaccctgcagacctcgctgcagactgaccgccgagatgagtacaacatccgccgcaatgaccgctcctccttccccacgctggcgctcgatctgaagagcttccaggcagatgcggcttggcgcaagcactaccaccgctgggatacggaggtgggcctgcacttcgtcggcacggagaactacaaccgacctggcacgggcgtcgtgcccatcatcccgaactacaccgaggtcacgggtgcagcacacctcctgcagaagtaccaagccgagcgctggggcgctgaggtcggcctgcgcctcgaccagatgacgctcaaggtagctggctacgacatctatcagcagctcttcaaggacacgaagcgcttcacgaacgtcacctacagcatcggcgggcactaccacctctcgcccctgtggcacctcacgacgaacctcggggcagccttccgcgccccccacgtccacgagctctacagcgaaggtaaccagcacggctcggcgatctacatccgtgggaaccgcgacctcaagagtgagcgcggctacaagtggatcacctccgtagagcactcgggtgagcgcctacacgtgcgtgccgacggctatctgcagtggatcgacggctatatcttcgatgcgccgacacacacgatgcacacgacgctctcgggcgaatatcccttcttcacctatcagcagcgtgatgccttcttccgtggcttcgacatcgacgcatcgtaccgcttcccacaggatattgagtacggggtgaagagcttcatggtatgggctaacgagcgtggcacgggccagctcttcccctatatcccctccttccacctcggtcagcacctcagctggagccctaagctcggcgggggcttctcgggtaaggtcacgctcaatcacctcttcgtcgctcgccagacgcgcttcgactccgctatcgacatcgctgacgcaccgcctgcctacggggtatggggcgccgaagtcgagctctcgaagacgctgaagaatggccagtccctgcgcctcctcctcacgggcgacaacctcctcaatgccgaatacaaggagtatacgaaccgcgctcgctactatgcccacgaagcgggtcgcgatatccgcgcctcactcctgtggaagttctgatcacctcgcttatctctctcatcctatgactctacgacagctatgcgggagccccaagaggctcctccttctgctcctcgtgcttgtcccgattctcacgtcttgcgaccccaaggagccgaccaacgagctactgaataagcgccacgataacccctcctacgtcatcttcacgctcaaggaagccaagctcaacaaccccacccgctgggatgctgagcccacactcgccgatatcaccctcacgggccgtgaggagaagatgaccctctcactcaccagtaagggcttcctcgccagcgaagagcagggcgtatcgcagttctccgtcaagagcaccgataccgagtcggatgtcgtctacctcctcgagatcgactacctcgacgcccgccgtgagctgatgaacgggcagttcatcgagaacggccaagaccgcatccaccagcacttcttcgagcgcttcacccgcgagttcatccgtggcaagtggcgtacctacgccgtcaaggagcccaaagagctcggctatgactaccgctacgtcgacgtcacgccgtggaatcagccctacaacgcgcccgagagcaagttcacgggcacaagcaatcccatgggcttcaagggtctcatccgcttcacacgcgccgactggaagttcctcttgacgatcatgctcatgcatgcgcaccagccgaagatctacaacggtcaggcgatgcccttctacaacaacctctattatcccatcgaccaagagtcggatatctcgctgaacgtcaccttcgtcgtcgacgccggcaccaccgacctcacgggtcgtgaagaagcttcttctaactaattaatccctcagaaacgtatgacaacgaaccgtctcaaggcttttgccttcgccagtatcgcagccctcagcctcgtcgctacggcctgctccggtaagtccaataacgaacccgtcgtacctccgacgcccacacccacacctactccctcacctgtcacccccagctctgacctcgacatcgccaaggtcgtcatccgcctgcagatcggccaccttcacggcaagaagagcttccactaccttccctccgaggctgacctcgagaaccgcaacctgcaggatgagcaggtcgtcacctacaccaagcagggcagcgagtggaagctcagcgagagcacggcgaagatcggcaacgcaagcgtgacctacacgctcgacaagttgctcgccctgcgctggagtgacacgcgccgcgagaaccccttcacgggcgagatctcgggtagcgactaccctcagtacggcatcctcttcgagtgctacaattcgaagggcgagctcctcgacaagcagctctccgctaagggtgcctaccagctcttcatctacccctccgacgtgaaggactacgacagccagtcggctatcacgaccaagtcggacttctccgatgtctttgagtacacgaaccttgatacggaggacttcacgaagtctgcacaccacggtcagacgaagttccgcgacgagaaggaccccgtcaacctcaagggctacgccatcttccccaagctcggctcacagatgacgctgaacttcgacctctacgctaccacgaagggtaagctcgagggcggaaacgtctcccccgtctacgcccctaatgcgacggtgaaggctggtaatcgtctcctccacctcagcatccccctttacatctacggcccctactcgatcaagcagtacgcttcgacgaacgatatcaagaagccgctacgccccattgaggacttcgccgctggggttgtagaagatgaagaccctgagggtaaggaagtgcctctggcgaaggctgcggcttaccgcctcgagaagatcctcggcaaggcctgggcgaatatcggccctgacttcacggacaatgctgtagcaccccgcgccaacgagaagacgggcggtatgttctattagtccgatcgaccccactccacaagcgagcggcggcagtccccgatgggggctgccgccgctcattatatgatagctgtacgtcttctttgagaaaatgcctcaaagtctacgagaaaaagctgcgtagcactacgcctaaagctttgtccacgcacgtagatcttaggactacgcacgtggatgataggattttcgtaccgagattataaatccacgcaccaagacgaaggaaaagctgtataggagctgacttatagcactacggggacggccgtttttctcctactcttcgggggaaagggctgtatagctcgctaccccatcatcgtagcggaagagccatgcatcggggagctatgcggagccttcagcgcagggcgcaaagcgctctatatgaagaagccgtattcttcttgtacctttgtagcgggaatttcggttcctcgtgcctctttggaggcacacctatcataaatgtaattacgcatgaccaagcctttacttctccttgcgtgcctcctcatgctcttggggagctgcacaggacgttccagccagagtacggctaccacagatagcatcgtcgccgacagcgcggacttcgcgcatgccgtgcacttcgactatgccaagggcatccaagtagccaaccatcctggctacaaggaggtgtttatcttcacccccgacgagcccgacaccctcgcccgctacttcctctatccccgcggccataagcccgaggtgactgcccctggcgcacgctacatcgccgtacccgtgcgcaccatgggtacgctctccacgacggagatcggcgcactgacgctcctcgacctgcgtgacgtcctcgtggcatgtagcgacccgcgcaacatcaatgacagcatcctcgccgagcgcacacgccgtggcgagatcgccgagatcggccgtggcatggggcgcaatgtcgagcagatcatcgccacccaccccgagatcattatgcagggcctgcaggagtccgatgccaaggacgaggatatccgcgcctcgggcatcgagatcgtcttcttcaacaactggaaggagcagagcctcctcgggcgtgccgagtggatgaaattcatcgggatgctcttcgggcgcaatgtccgtgccgaagagaccttccagcgtatcgagcgtgagtacctcgaggcgaagaagatcgctgcacaagagcccgacttcctccccgtcctctacgggcaggactacaagggctcgtggtacgtcccaggcgaatactcctacgtcacctcgatgctcaccgacgcacacatcaagtatgacttcatccctgggcaggtagcgaataagcccatgagctttgaatacgtcttcagccgtcaccgccacgcccccgtatggctcagcatgatggtcggcaaggacattaccctgaaggacttcctctcgatgaacgagcgctaccagcacttcgacgcagccaaggcgggcaacgtgtggatcgaccgcaagcgcgtcaatgagtacgggggtaatgactactgggagagcgggccctacaacccgcacctcatcctgaaggacctcatcaagatcacgcgtccgcacctcctccccaactacgagacgacctactgggtcaagctacagtagcccatgcgcgcacgtcactcgatcctcttcctcctcatctcgctcggcatcgtcgtggccttcgtgctcgacatcatgtggggcagcgtctctctgcctgcgagcgacgtcatcgacacgctcctcggccgtggtgagcatacgacgacgagctacgtcgtcctgaacttccgcctgccgaaggcactcacctcgctcatcgctggcgcagggatctccatcgcaggcctgcagatgcagacgctcttccgcaacccccttgccgatacctcaatcctcgggatcaatagcggtgcaggcgtgggcgtagcgatctatacgatggcttacacgctcttcccctcgctcctctctacggcaggcgtggcgaacacgtggggcatcatcctcgccgcctgcatcggcgcgctcagcgtcctcctgatgatctccgccgtctcgagccgtctgcacgacatcgtctcggtgctcatcgtcggggtgatgatcggcttcctcgcctcgagcgtcatctctatcctgcagtacttcagtgacgaagagacgctgaagacctacctcatctggagcttcggtagcgtggcgggcacgacttggcgccagctgcagctcatgctccccgtcgtcctcgtcgggctcatcgcggccctcctcatgccgaagcagatgaatgccctcggcctcggggagaactatgcgcgctccgtcgggacgaacatccgtctggtacgtcgcctactcatcgtcatcaccagcatcatcacgggctgtatcacggccttcacgggacctattgccttcctcggcatggccgtcccgcacttcgtccgtctgctcttccgcacggccgaccaccatatcctcgtcccagcgacgatcctctcgggctccttcctcctcctcgtgtgcgacctcctgacacaggccccaggccatcagttcgtcctcccgatcaatgcgatcacctcgctcctcggcgcccccgtagtcatcctcgtcatcctgggtaataagcgtaagcgcaatgccttcaagtaagacacagcacctcacgatcgagctccgccacctccgcacaggctacacggagcgtcgccgtagcgtcgtcatctcccccgacctctgtctctccattcgcccaggcgagatcgtcatgctcatggggcccaacggcagtgggaagtccacactcatgcacaccatggcaggcctgctcccaccccttgcaggcgaagtagagctgggcgaaaagcctctctccagcctcacgatgaaggaggtcgcccgtcagctgagcctcgtactcaccgagcgcatccccgcgggcaatatggacgtctgggaggtcgtcaccatcggtcgctacccctatacgggcttccgtggtgtgctcagtgccgaggacaagcgtatctgcgaagaggcactcgccacgtgccgtctcacggagctgcgtgagcgtatcttcgacacgctgagtgacggcgagaagcagcgcgtgatgatcgcccgtgccttggcacaagagactccgctcatcctcctcgacgagcccacggcgcaccttgacctcccctcccgtctggaggtgacgacgatgctccgcacgctcgcccacaagctcggcaagagcatcctcatctccacgcacgagctggatctggccctcggctgggcggacaccatctggctcctcgaccgctcgggagctatcacagccaaggcgcccgaagacctcatcctcgatggcgatatcgagcgtgtcttcggtgacccacgcctgcgcttcgacagcgagcgaggggaattctccatcgccgaagagccaggtcagcagatccatctcacgggcgaaggcctacgctacagctggacgtgccgtgcgcttcaccgcctcggctacggcatcatctctggcgacctaccgcccgagaccagtagcatcaccatcagcgaagcgggctggacgctccgcacccctacggggatcacgacccagcatcactctatcaccgcactcctctccaccctcggagagcgcagtgcatctgtatattaaccaagcaacgaacgtatgaaacaaaagctaacgcttctcatcgcggcggcctcactggccctcccgctctcagcaagcactacggatagcctccgtaccacgaacctcgatgaggtcctcgtctacggtacgcgctccatccttcccctgaagaaggtgcccagcaagatcgaggtcatcagcgccgagaccatccagcgctcgggcttcaccagcctgcccgacctcttgaagaactacagcagcgtcgacgtcatccagtaccctggcttcaacgctaccgtcggtatccgtggcttcaagcctggtaaggcctataccaccgtcctcatcaacgggatccccacggcgtcggagaacatctccaccatcgccctctcggacatcgcacaggtagagatcctcaagggacccttctcctcggtctatggtacgaatgctatgggcggtgtcatcaacatcgtcaccgtacagcacaaggagcagctcacgggtcgcgtctccgctacggctggtagctacgacacctacgccggtacgctcgctctcggtgggcgcatcgtctcgggcctgtccttcgacctcagcgctggctacaccagcgagcacacgaactacaaggctggtaacaacgatatcctccgtcacaacagcctcgccaaggctatcgtagaccccgagacgcgtggcgctacgatgccaggtagcacctatggtgtctacaccggtagccttcgcctcggctatgacttctcgcccaactggtcggtaaacgcctacgagaacctcttcatcggcgacgctatccgcaccggtggtagcatctacggggtctacggcctctcgcagaaggatatcacgcgctcgctcacttcgctcgaagtcctcgggcaggtcggcatccatcgcctcgcactgcgcccctactactccttcgaggtgtcgcagaactacgacaaggctggtagcggtgctatcatcaactaccgccgcaatggtcaggactacggggctatcctgcaggacgacatgaccctcggcgcacaccgcctgaccctcggtgccgactacaagaagagcgacacgaagaccaagtccttcgacgctacgggcgcccagaaggcgagctacaatcccgactactcgacctccagcctcggcttcttcgcccagacgaacctcagcgtcaccgagcgcttcatcgtctcggcgggcgcacgcctcgacctcatgcgcttcgacctcagtgccgacagccgcctcaatagcgaagctaagcacgagcagcacctcgtcttcagccccaacctcggcctgaagtatgagctcgcccgtggcctgcgtctacacgcctctgctgggacggccttcgctgctcctgacgcctaccgcaaggcaggtcagtacaccagcggcaagacgacgaccgtagggaatcgcgacctgcgccccgagagctcgctgaccatcgacggggggatcggctataccaactatgagaagggtatcgacctcgacgctacgtacttctacaccgaccacaaggatatgatcgtcgacaaggtcacgacgaatcccgacaagacggctacgaagaccttcatcaatagcgacaaggctcgtatgcacggcctcgagctgatggccgcctacgacttcggtagcctcgtggactacgccttctcactgaaggcctacgccaacgctacgctccttctccactcgaagatgaagctcgctgccgccagcgactggacgcctatcaagtacgtgcgctcgcagaacgtcaccttcggcctcgacttcaccacgcgcgaaggcctgcagttcggcctctcgggtcgctacatcggccagcgctgggaggacaactggttcggctactaccccgatatccgcacggggctcgctgcacgcgtagcagctgagcagcccgagtggggccgtcgtctccagcacccctcggcactgatcttcggtgcttcactgcactacaccatcaagcagcgcctcggtctgggggtcaatgtagacaacctctacgacgagcactacaccgagaaggacggctaccacatgcctggccgtacggtacgcttcaagcttagctaccagttctaagccctgcgctaaggacttcccctaaaagcacgtatcccccacgatccgctcgggtcgtgggggatacgtgtatataggtgggtgagggcgcttagtgcttcttcttcccgcgacgacgcaggaggcggcgcacatagtcgaaggcgagcatcagccccgtcagcgaggtaatgagcccgatgagcatgaacgcccacatcacgacgggccatgcccctggggtattcaccaagggagcgaactgcaggcggtggagcttcatgaacatccacgcatcgatgcgctcactatccgcatacatacgccacatacccgtcttgggatcgacgtagtaggtgtggtggtccttcgtgtcgatagcgatgcgccagacgggcaaggggagcttgccagagcggctgatgtagtacgtgtcgtacttgtccatcagctcggtcgtgtagtggtgaccttcgccgaagaccgtacggagctcggtgacgatctcggcgctgtcgaggctgaggcgcttgggtactacggagcgaccatcatagtagtgcgcctcctgcccatcggccttcagcacggggatatgccccagcgaggtgaaggtcagggcgcgtagctcgggctctgcctgacgcagggccgtgaggtcggtgcagtagtccgtcatgccgagcgggcgcccctcgagctgctccacggggtagtccgtcgtctcggtatgggggaagtgcacgacggagaggagccccgtcagcacccatgcgatgatgagcacaccgccgacggtaccgaagaagtggtgccactggtagcgcttgcgggggaagggcgagaagagcttcgccgccttcttcttcgcacggctacggtagtgcacgatgcctaggtagaagcccgtcagcgccataaacgtaccgatagcgccgaggacgatgatgacccagcgccagaggtcagcacgcgagcggatgtaggtgaagtagatccagtgcgggatagcgccagcccacgcccagaggcgctcgctgcgggtggactcctgcagcacgtcgcccgtcacgctcgagacgtagacctcatgccctgccccaccggtgaggaggagacgatagaaggggagatcctccgtgaggcgcgagaagggcgtccactggtcaagctccgtgatggtgtcgatgcgctcgatacgctgcccccagcgggcggcgatggtctccagatacgctctatcgagctggagcgagcgcaggctgtcaccgtcaaaggccagctcacggcgctccccctctacggggcggatgacgagacgcgcacggctgtcggcatacgtcccgcctgagatcttcaggcgctccagcggcaccgtgtcgagctggagggaggtgaagagggcatgcaggctatctgtcgtgggcaagctctcgggcagacgggtgctgtgcttcagctcctcgtccatcgagtacttgggataggcgtggtagataaggacaaggcctgagacgaaccaggccacgaagaggacgctcatcagcgcaccgaggaagcggtgcgtgcgcgtcatgaaggagcgaaaggtcatagttaggtcgaggtctgtgtggtagtagaggtagatagtaagagatcagccccccaccataccataggcacagcggggggctgataagagctttatgaactcggtcgggggattagccgttgaccttagccatgtgagctacgaggtcgaggaccttgttggagtagccgatttcgttgtcgtaccagctgacgagcttgacgaacttgtccgtcagagcgataccagccttagcgtcgaagatagacgtacgcgtgtcgccgaggaagtcgcttgatacgacatcttcgtccgtgtagccgaggatacccttgagttcgccttcagaagccttcttgatagcttcgcagatctctgcgtaggtagcaggcttagcgaggttgaccgtgaggtcaacgacagagacgtcgagggtaggaacgcggaagctcataccggtgagcttaccgttgagctcggggatgaccttacctacagccttagcagcacccgtagaagaagggatgatgttgccagcagcagcgcggccaccacgccagtccttggcagaaggaccgtcgacagtcttctgagtagccgtcgtagcgtgaaccgtggtcatcagaccgtcggtgataccgaagttgtcgtggaggaccttcgccagaggtgcgagacagttcgtcgtgcaagaagcgttagatacgaactgcgtgcccttgacgtacttgtcggtgttgacaccgcagacgaacataggcgtgtcgtccttagaaggagcagacatgacgacgtactttgcaccagcgtcgatgtgaccctgagccttttccttagagaggaagagacccgttgattcgacgacatattcagcaccgatttcgttccacttgaggtcagcggggttcttttcagcggtgatgcggatcgtcttaccgttgacgacgaggttaccgtccttgacttcgaccgtaccgtcgaagcggccgtgcatcgtgtcatacttgagcatataagccatatactctgcatcgaggaggtcgttgatacctacgatctcgatatcgctacgcttctgggcagcacggaagacaaaacggccgatacgtccgaagccgttgatacctactttaatcatctttattattcgtttcgttaaactgatttactgaatctctctgttgctggatgatagccccttggtgcggggaacatcttgcgatacaaaattacagaaatttatccacacctatgacttatttccgaaaatattttggtaagtgtgcccttaccgcccattttgctctgcaaaccaccccacaaagccccaccaacgacctgccgacgacctgctccccgatgctccttcgtcccccttctccagccctttgcccatccaccttctcgaagggcaaaaagtaaccagtagtggtcactcgtctgaccagtactggtcgcagcgcgaagcagtacgggttaatatcagttaccagtactggtcacgtcggcgaccagtactggtttgcctcccccttcctccgtcttatcgtgacagcctttcgctatagctctatctatgatagacaccgcttgcaccaccgccctaccacaaggaggggaaagcaacctatataggtcagcgggctaacctatatagatccgacgacgaagctatataggttgcgatgacgacctatataggtcagcccgccgaccaatataggttcataccacccccatccgcaagcccgcatcctacctctcccatagcttccccgccatactccccgctgaaagggctaactttgacagcgaactccctcatcatccccccaaaggaaatagcttattcagacgacaatgatagcctacaaagagattgcccaaatcaagaatgtacggggccttaaccccgtcacgggagactattcctatgaggagaatgggcggggctacctctgtattgatggtgtcttgcttgaaaaagaggagcctcctcttgatatcgtttctgtaggtgaatacgtctatgcgtggtacagtcgctatggaaccatagagatctattcggggcataccttactcaaggtatttgagaagaaggtcttccttcttgatgggaatataggcagttacattgggtatcatattcgcgaccctaagacctttgaggcgagtgagaatatcctttcggtctcagacgggcaacctctcttagcgcaaaatgtcccttatagcttgtataaagtgggtgaggagatcatcggttataagattctcgagtgtaagcttagccgtttgaactactctggcgaggtgctttggacctttgacttacccctgtgcgaaagtagtcgcgatgaacctgacgactacgataaccacgataaactggataaggtgctggggatagcacaaggtctgctctggatctgcacccgttggttccgacttatagctctggatctggagacgggtaagcccgtgcatctgttctctggaggctggtttgatgaagatcattccaactacactgttttagatggcttggggtggtgcttcttccgtgaagctgaaaaaaccatcgtattaatcagcaatttgggggtgcagatccttgatgctgctacagccaagatcatcgagggctattctttttcgaaggttgatccgcaagggatcggggctttcgagtatttcgatgccgcacgactccaaggggactactttacattcattgccgagcgcccgtacgaatcttatggcacggggtgggctggtgtctttgacctaaaggctcgtaagttgctgtggacggatgaagtcacccccaaagagaaaagaacaaagggccttcatctggtcattacccgccccgtgtactacgctggaaacaagatctacgtcttggacaacagcgataccctgcatatctaccgaaaggaatggcgcttacatgcgcaagtgcgtccgcagagcgaggtgaccgcctccgccgcttgcgtcaccactccctctgtggggaggtagtagcgacctatagtggtcagtggggcgaccagtattgatcgaggtgcgaaccactataggttactaccaccgaccactattggttgactcgtgaaccactataggcttgcacctcgtaccactatatttaattcaaggtaacttatatgagaatgcagttcgtttgtaaggcgattactataactgtagtgatcctctttgtggctcttgtagggttctatctatggtgttttacatcttttagattatactttaatctccttgatgctcctactttggaatttgagaccacatggtttgaccgctcaaaaaatgagacttatatattcctaaaaagcgatattcccttggaggaatttgatggctcttcttacttgcggttgttgggaagggaggctgccgactcattgccttattcgaagtattttaaagacgatattttgattgacaacgtcgtattggattgtagtagtgttataagaagggaggctacatttggggaatttacttacgtcgctattattccgggtgagttgccgagttatacaatttatgctcgattattctttattaaggcctacggatattcattcggaagtaaccttattagaataaagaaagaacatttatgcagtcgaaaaggtgtttgttacgggcgtacccagcttagtgaaatcttagaaaagacagcgatcggctacctgaaagagctgtcagaaaaatactcgccagggtcggtgatcgcagatgttccctctaatagagtgggagctaatgctgggatctttgaagagaatggggggaaaacccttcgtgggcagatgatccttgaggtgcctgtgcagaaggagccagtacccgagagtgtattacgctatgctattgagaataagattcaaattagagatgttaaagggaaaatatataatctagaaagatgaaagtaacattagaagcctggaatcacggctataaagaactgctgagagctgaagcctcattacgcatgttagatcgctacaacaagacgcgttactcgcgtcgtaagaagcaggagggtctgctggagctggcttcgcgcgaagcccacgagaggcaggcggtttacttcgccacgatcctcaacgatgatggtagcccctactgcgcgatggagtccaacgtcgggtacttcgggctcgacttcctcgggaataaatacgaaaactatttgctatatgagtatagggaagatgagcatagtgggaagctcttcctaaaagtcatcaccttattcgaatgttaccctgggacgacagagaagaagatacgtatagacttcagatatactaaacaaggagactactcatctctcctctaccaaggggagtcgtatgatgggacttatgaggagatccgcacggattatcccccgatctcagcggaggagctggagaagctctgggtggactatccaaagttcggtgaatacgaccagctcattcgtctggaccgtatcccccagctggcgcgggagcgaatcctcgagtacaccgacaaggagttccccgccttccgcgagtacctccagcgagacatagaccgctacgagcaccccacgaagtaggcgcttcgcgagccgacggcttgcgtgcgagcgggagcgcaccatcttttccatcatccccccaaaggaaatagcttattcagacgacaatgatagcctacaaagagattgctcaaatcaagaatgtacggggcgttaaccccatcacgggagactattcttatgaggagaatgggcgtggctacctctatattgatggcgtcttacttgaaaaagagagaccagcaagtcagctcgtctccgtaggcgaatacacctacgcttggtatagctatggctgcatagaagtctattcggggcataccttgctgaaggtatttgagcagaaggtccgcctacttgatggagatgcaggcgcatacattgggcatcatacttgcgatcctaaaaccttagagacgggtgagaatatcctttcagtcccagacgggcaacctctcttagcacaaaacgtcccttaccacttatataaagtgggagaggagatcatcggctatagggacttcgagtctaaactcagtcgcttgaattcctcgggagaagtgctttggaccttcgacctacccctgcgtgatagtagtagcaatgaccccgacaaccttgaccatcttgaaaaggtgctgggtatagcacaaggcctactctggatctgcacccgctggtgtcgacttatagctctggatctggagacgggtaagcctatgcatcagttctcggggagagtctgtattgaagattattactccaactatactatcatcgaagtgctgaggtggtgtttcttccgtgaagctgaaaaggatatcgtattagtctgcaattggggaatatgcatcctcaacgctgctactgccaagatcatcaagagatatgagttctcagaagtagacccttatggtagaaaggcttttgataccctcaatgctccacaactatacggagagcaccttacattcatagcagagcgacactacgcactcgatggatatcgctgcgctgggatctttgatttgaaggctcgcaagttctattggataggggatataatctcggaggaagagcctataggtaatcacctgcttgcggagttcccattgcagatggcaggagataagctctacatcaaggatgctgagagcactctgcatatctaccaaaagcaatggcgcttacatgcgcagttacgtccacagagcgaggtgatctccaccgctgcacagtacatcaccccagccgtatctgctaccccaccgcctacagagggagataggcctacacctctattcatcataagcctgtgcaaaaaaatacccagactgctaccgtacctcatcgtcttgcttctggggatgcttatctggcacttcagactggatatattctctccatctcacgaacactccaccttagcaagtagcttgattataactcaagacacaaagtctcaggtagtgcttctcaaagaagccccctactttatgcgtaataggcagaggcagatcgaagagatcttttggagcaacatctcagtcgacacgctgcttcgctaccctcactataaggtctattacttcctgcagacggagcgcctcaaggataaagtaggtgagatcggagtgataatgcgggaggatagtacatacatttatcacatgcagctccagagccctggcgtgggattcgacatcttctccgccgtgagccactactactctctccaggagctttatgcgagcaagtgtgaagaactcgggataaaaagtggacgctaagccctgcgcatctaccagcgggagtagcacctacgaccgagagcatacaaagcgccacgggctcggcagcatcggctaccgagcccgtggcgctttggtgggagcggtgaagggcggggctacgcttcgtcttcgatgaactgatccacgaagagcgacgtgccgtcccacaccgcaaacgaattgtactggagccagtcgccgaggatgacgatacgcttgtcgccacgcagcgccaggtcgatcaagaggtggcgatgcccgaagaggtagtagtcgatctcggggtgctcggcagcataggccttggtccagcgcaccagccactccttctcgacgtcgaagtaatcattctgataggcgtggggcacctcgccgagggtggcacgcttgaggcccttcttacggctacgcagcgagcaggagagcgcgaagcctaccgtccagcgggggtggacagcggcatagagcacctgcgccagacggcagcggaagaggcggtagaggaacttatccatgcggcggtagccacagtactcctcgtcgccatgcgccagacggaaggccttgccatcgagctcgatgacctcggcgtggtggtggaccttcgcccccagctccgtctgcatgtagtcggcgaaccacacatcgtggttgcccgcgaagaaatggatctcgataccacggtcgctcatctcagcgacttgcccaaggaagcgcacgtgcccacgggggacgaccgcacggtactcgaaccagtagtcgaacatatccccgaggaagtagaccgcacgcgcctcatcctcgatacttcgcagccagcgcaccaggcgctgctctacagcacgaggatccgcatgatagcccgagccaaggtgggcatcgctggtgaaaaagaccttcttgcgctcgctcatcgctactaaaggaagcctaactccagcatcgcctcttcgctcatcatatccttgctccactcgggctcgaaggtgagctgtatctcgacacccgtgacgccctcgacgtcctcgaccttcatacgcacgtcctcgaggatgaagtcggcggcgggacagttgggtgccgtgagggtcatcgtgatggtgacgaacttctcatcggtaagctccacacagtagatcagcccgaggtcgtagacattcacggggatctcggggtcgtagacggtgcgtagtgcagctactatatcttcctcgatacggaggtattcgttctctaattcttctgccataaaatatcattgagaggggagggtaatgctcccccttggggtgaataaattaacgtagggaacccgatgcccttgctacagctgtagcgtgcggtcacaggccgccgcgacgtcaggatggtgagtaatgaagatgataaggcggtcggaggcgtgctcacggagattcttgaggaactgcgcttccgtcgcttggtcaagcgccgaagtggcttcgtcgaggaggaggatacgcccaggacgaaggagcgcgcgggcgatagcgatacgctgcgcctgcccttcggagaggcccagcccacgctcgccgatggtcgtatcaaggcccttcggtaggtcaagcacgaagtccgcgatagccagatgcagcaccttatgcaggtcggcctccgtagcgaactcatcgccgaggaggagattctcacggatcgtcccgctgaagagcgagccgccctgcgggacgtagacgaagttggagcgcgtcgtctcgctcaccacatagctactgccaccagagtagaggcggatagccccctcgacaggcgagacaagcccaagcagtagacgcaggagcgtggtcttaccagcgcccgtacgccccataagtgccaccatctcgcccgtcgaagcctcgagggagaagtggcgatagatccactcttcgccgtcgggatagtggaagcccatatcctcgacagcgaggcggatagggctggtgagctggacactgcgaccgatctgctcggtcttgaactcgaggagatgcgccagacgatccagcgagctcttcgcagagataagtgtcggcaggaggctgataagcgtcgtcagcggactctggatacgtgccacgagctggaggaacgacgtcatgagcccgaaggagatcgtaccaccatacagccctcgagcactccagaggaaggccacgaggtagccacacgagaaggctccctgcatgatgaggttcgcgaagaccgagacgaaggtctgacgcttcaccgcaccgaggtactgcccttgacgcatcgccagatggtcgatggaggaggcttggtgctcgaaggtacggatgacggtctggttcagtagcgactcctggatgtgcgccgtgatctcgctctccgactgcttcatctcatcggtgtagcgacgcatgcgcttgtagtagaccttgctgaagactgcgagcagcggcatccccacgccgaggataagggccagcggagggctgaagtaatacagcagacagagagcgccgacgagctgcgctaaggcaatgagagccgacggcagggacgtgacgaagagggcgacgaggctatccgtatccttgagcatgcgcacgaccatatcaccgctatgcatctgcccgaggtgcgaccagcgcgtgtagagcaggtgtgcaaagaccttcgactgcacggcattgctcatgcgtgcagcggtatagttcgagagacggacggtgatgactcggcagaggacctgcagagcgagtgtgaggatgagcgctgccgaataggtgtgtatggagccaccgcgctggtgtgcggcgatatcaatgacgcacttcgatagccagatgaagatcaggttggtagcgactgtccccaagccaaagaggaggatcagcaggataccccacttatgtcctctaagtatgaagcgtacgaggtcgatcatctccgccgacggatcatgagcatgaggtgccccaggacagagccccagatgatgcgtgaggcatgggtcggcgtgatggcgtagagtcgacgggagcggcgcatcttgaagcggaacttacgccagttggtcacccacttattctgcgccttgatggggcgctgggcgaagccgaagttcccactatgcatcacgtcacggatgatctgctcggtgtgcggatcgtcttcgctcagcagcgggaaggggaagatctccggcgagacacgcaggtagcggatagcggcctgcgcgaagagctgcatcgggtagaggatgtcgagatccttcgccatgctgaggatcttctcttcgtcgagctggcccttgagcttggtcatcatcagcagccagtcgcagtactgacggaagccgacgccccagtgaagccaatggaagaagagatgaataaagatatagacgacattcagctcgtgggggagcgtctggatggtgtagtccccatggtgctgggtgatgagactcccactgccgatagcctcttggatgagggcatcgaagtgcctattgtggcgcttgtgatcgaagaagacggcacgagcgtggttctccacgatggtacggccgtaggtgaaggccgtatgcccatagcgcacctcggagtcgtcgtggagcttgtgaccggccttgcgcaggagctcattgccccgctcgtagtcggcatccgaatggaagaggatatccaagtcgcctccagagcggagggtggcatcgggatagaagcagccaagactcagccccttgagtaagatgaagggcaggcctgcggcttcgtaggtcttctgtagctggcctaaggctttggttaaataggcattaccccgccgtgtgagctcgatctccgagaagatcatcaggcgcatatcgcggttgggcagggcttccttcggcagggtaagtatacggtccccgacgaaggccggcactgcatgcgatgctgctaagcggtggatcctacgccacgacgcttcctccagacccgtgaagtcacgagcctcggggagctctgagtgtagggcacagctcaggagcttgaggaatagctcctcatcatgcgagagcggggctatttggctcaacagatgatcccggcctctttgagcatttgcgagaggagctcgacgtctgcacgtgcctgctcctggctcacttcgtagcggtcggtgagtagctcgacccagtcctcaagggtgaagtcgcgctcacgcacgctctcgatgaggtaggctgcactatcgttgaggctcaccgcctgcgtgtagtccaagctatctcccgagcctgcgatcatgatgtactcatccgcaatcttacgtagagagatgtggtccttaattctcattatctgtgatacgtttgtcgtttagtcgtctgtaggggtggctaatcccagtcctcatcccagtcgaagaggtcgagatcctcaggcatgtcctcggcgaactgatccaggtcgcggcggtccttcttcgtaggacgtccgagacccttggcccgatcgacgaagcccgagatacgctgcagctcgagcagctcatactgtgcggcgggcgtgacgttctccatgaactcaggcacacgcttagcaccgacacggctcgccagaagctctaccacgcggaaggagtactcgaccggtggcttacgcaccgagacgatgtcccctcgctggagggtacgtgagggcttgacagtcactccgccgatgctgacgcgccctttcttgcacgcgtctgtggccagcgaacgggtcttgaatatgcggacggcccagagccacttatcgacacgtacttctcccatgctttgtcgtatataattacagcaaagatatgtattctctttgaagaagtaacataagcagcaccctccccgcgttctatcgcgtgcgcacgcgcccagctccttatatatataggtataggctacggcatgagggcgtaggcgtcctcgtagtgctgatagaagagcttccagtcagcacagcgcgccagctcgtaggctttcttgcgctgggccttctgctcgtcgggcgtcagcgcaagctgctcgccgatgagacgggagatcgcctcgatggtctcggggatgttggtatccgtgcgctcgacgatatgcacaggcttgtgaggggcggaggcgaagggcttcttcgtctgctcttcttcagcccacaggccgaagcccgccagcgtcgtcgtgatcgtaggcacgccatagcgtacactctccagcggcgtatagccccagggctcgtagtagctggggtagatggtcaggtccatacccacgaggaggtcgtagtagctctggtcaaggatgccgtcgagcccattgagatagcagggtacgaagacgaccttcacacggcggtcggtgcggtcgaggccacggtgacggatgtggcagacggcacggtcatgctcggtattgtagagccagtggctgagcatagggtactgcagggggctctcctgctcgtcctgcggatgtgagaggaggtactgcaggtcggcacgggggcctgcctgccatgcgggcacgaggaggaaggccacgatgtcgcggtcacctgtatagctctcggcgaagtggtgcagggactcgatgaagaggtcgatccctttattgcggtactcatagcgcccgccgagagagatgaagaaggagcgtgcaggatcgatgtgctgcccgtagaggcgcgaagccacggcaccgaggagacggcgcgacttacggcgcttcgaaagcatgggagcagcgaggggggaggtcccgacgtggaagccattgggcaagacgacgggttcgcgcccgaggagctgcttggcttcgcgggcggtgagcttgctgacggtagcgaagacgtcggcctggtgtgcggcgagcttctctacctcgtgcttggcttcgacacccagctcacgtgccatctggtcgccatcgtaggcatccatataggtgtagagctccttgtcattccccgcgatagagcggccgacggtcgtagcgtgggtgatgaagagcgtgcggacgctgggagcttgctgtcgtaggtagagcaggcccatggcggtctgccactcgttgaagatagcgatggtgcgctcatcgatgcgccaggcggcgatgctggccataaggcgcgcggcagcgatactgaagagactgctctcgtcatagtccccatagcccttgtcgctctcgaggccataggccttccacagctcgaagtagagatcatccttctcccgccacagaggcttgaagtccacgaggagtacggggggctcaccctcgataccccagcgacctgctacgacacgcagaccgaggctcgggaggacctctcgcagccagccttggagctcggggatctctccggggatgaagtcaaggggcagcgccgcaccttcgtcggcgaggagtggcccgataaagcatacctgtgcggggtggtgctgggtcatcacgtctgcacgtgaggagaggacggtatagatccctcccatcttattgcagacttcccaactggtctcgaggatcataatcgtagtacagtgaaggtaatgaatgtatcttgccgtgaggtcccagccagccaggctgtaacctttgtctcaaagttaagcattcgcccccacattaccacatctccttattacatttccttagtaagcctcacctcacccacgggaagcaccctaccctcttgcacgcaacaatctctacaacagcgttatcagcacgaatagccctctcacatgaaccacttcttacgactcgcaagaggtgcttcgtatcgtactcttgctcaggagcctacgacggcggaaaagtaatcagtactggtcactcggctgaccagtactggtcgcagcgcgaagcagtacgggttgctatcagttaccagtactggtcacttcggcgaccagtactggttcgcatcccccctcctccgtattgtcgtggtagcttttcgctacagctctatctatgatagacgctgcttgctccatcaccctactacagcgagataaatcgacctatattggtcggcgggctgacctatattggtccgacgacgaagctatataggtcgcgatgacgacctatatagatcagcccgccgaccaatataggttcataccaccccttccgcaagcccgcatccttccctcccatagcgccccagccgtactctcgccgaaagggctaactttgatagcgaactcccccatcatccccccaaaggaaatagcttattcagacgactatgatagcctacaaagagactccttggcatgagaggaagagggagacaccagctcctcacacctcgttcgtgatgaagccgctctattgatgagcatggtgccagcttcgaaataacaaaccaataagtatgtttcagcctctctcaaagcactccttttccttagtgaggacatacgcggatcgggtattccttggctttcgaacttctgatggaaaacgccatctttatccctactcccttgatggggagcttggggaagaacttaagttctccaagaagggtctgattagttggatctatctgcgtagtggcctttggcttatccagtacgagggagcctctaaagaggatacccatatatattcgattgaaggagaatggcagcagaccatccctcatctgcatgcagatctatatatcctaaagacggaggagaactgggtctatcttataaatgaacgcttcattaagtacaatctctccactcatgagtatcgggatctgggcatgtttcctcttaaagaacccttcttttatgagggtagccaccgtggtcttcacttcttcacttgtgaacggcagagccagctggtagccatgcgagataaggatggtcaaggcttggaggaggtctatcggctggactttgcagagagcgatcgatgcaagccaagctatagtcgtaatgtagagcctgggcaggtctacttcatcaacttctatgactccgatctttgggtgtcgacttacgagcgggtctatcgaattgatatagcgactgggcagaagcttggcacgctggaggataagttcttgccgaagatgtctcatcatggagggattggctatgccatctattccggcttctatacggtgatggactttgagaaccgacgactgctgtcctgtcgactgctcgacaagttcacccacgaagggaaggagtatagtgcggagtacacgggcctcttgctacacgaagggatcttctacgtctcggtgcgggtgtcgggtatcttcttccttgcagcctttgacgtgcagacggaggagtttgtttggcatgacctctggggtggttgggatatcaattccgtgcacatcgtcggcaaccgaatgatcgcccactcccacgatgaggtacgcatctaccagcgggctggccgattaacgcgtcttgtcaagaagctccgaggggcactgcttcactttatctccccccttacctcaggtcgataaagcaaccactattggtcagcgtgcggaccagtagtggttactactacaaaccaatagtggtttgcaccccgaacgagtagtgatatgcacgcgtaccactattggtttgtaccacggacgagtagtggtttgtatcccctcctccgcaagactgcatcctaccgcgcctcgtagcactcccgcgggtaaccgcaccaaaagccttacctttgtactcaatagctggtatcagagagacgctaccatgacaagctccccctctgactactaactgaaaccgacttaatgaaacttcatcatagcagacagcgtgcgctcctgctattgtgcctcctgctccttcctctgaccaaggcttgggctgctgggcatattgacagtatccacgtcctcgagggcgtagtcgtcacggagcgcttgatcccgaaggatgtcatccccgcacaagtcttgggcgggcgcgacctccagcgccttagtgccgtgagcgtagctgatgccttacgctacttcgctggtgtccagatcaaggactacggcggcatcggggggctgaagacggtgaacgtgcgcagtatgggttcccagcacgtgggcgtcttctatgatggcttgcagctgggcaatgcgcagaacgggcagatagacctcgggcgcttctccctcgacaacatggagaccgtctccatatataatggtcagcgtagcaccatcctccagcctgcgaagagcttctcctcggctgccgcgctctacatgacgacgcgccgccccaccttcgccgccgagcgtaagaccaacctcaaggctgctctcaaggcaggctccttctccaccatcaatccctccctcctctacgagcagcgcctctcccccaccctcgacctctcgatgagtggcgaatacctctatacctcggggcgctaccgcttcacctacaagaagaaggatggctacgacacgacgtccgttcgccacaatggcgatgtccactccctacgccttgagacggggctcttcggacgactcgacgaaggcgagtggcgcgccaaggcttatctctatcgctcggagcgtggctaccccggagccttcgtgcgcgaagagccggggaagttcaagcacgaggaccgtcagtgggataccgacgtgatggcgcaaggcacactgcgcaagaccttcgggcagtacaccctgctggcgaatgcgaagtacgcctacgactacctccactacctctccgacccacggctggatgtgacgacgatgtacgtcaacaaccactaccaccagcaggagggctatctctccaccgcccatcagctcagcctcggcgacgactggcgcgtagcactggcctcggatgtgcagtacaatagcctcacggccgacctctacgccttcgcctaccccacacgcctcacgctcctcaccgctgccgccgccgactacagccacggcgggctgaaggcacaagccagcctcctgcatacctacgtccacgactggacgaaggccaaggacggccaagcccccgagaagagcgagtggacacccaccctcatcgccagctacaagcccctgagtcagcacgacctcagcctgcgcggcttctacaagcggatcttccgcatgccgaccttcaacgacctgtactataccttcatcgggaataagtacctccgccccgagtacaccacgcagtacgacctcggcgtggtctacacgaaggccttccagcacggagctctgcgccgtatggaggtgcaggcagatggctatctgaactatgtcgatgacaagatcatcgccatgccgacctcgaaccagttccagtggacgatggtcaacctcgggcacgtccgcatccgcggtatcgaccttgccctcgagacgcagtggctgctgggtgccgtcaccgcctcgacccgtctcacctacacctatcagaaggcccaagacctcaccgatccctccgacagctactacggagggcagataccctatatcccttggcacagcggatcagccatcgtcaccctcggctggcgtggctgggagcttaactacagcttcatctacacgggcgagcgctatgatgccagtgccaacatccgcgagaactatatccgcccctggtataccagcgaccttacactatcccgccccttctctctccgtggccacagcctacgcctgacggctgaagtaagtaacatcttcgaccagcagtacgaggtcgtgcgctcctaccctatgcctggcgcccacgccaaggtcaagatcgaatacacactatgaccaccagctagctatgaagacttcatccatcacccgcttactcctctgggtaagcatctttgccttctccctatcctcctgtcgcaaggaggatgagatcatcccctctaccgaagagcaaggggggaagccagaacctgctggcccgattaagggcttcttcctcctcaacgaggcgaacatgggctccaataagtccaccctcgactactacgactacgagaccggtaagtacacccgcaatatctatgcggagcgcaatcccggagtcgtcaaggagctcggtgatgtaggtaacgacctacagatctatggcaaccgcctctatgccgtcatcaacgtctcccacctcatcgaggtcatggacgtacgcaccgccaagcacatcggcaagatctccatccccaactgccgctacatcaccttcaaggatggcttcgcctatgtcagctcctacgctggccccgtccagatcgaccccaacgcacgcctcggctatgtggcgaaggtcgataccgccaccctccaggtcgtagctgagtgccccgtaggctatcagcccgacgagctcgtcatctcgggggataagctctacgtagcgaactccggtggctaccgcgtacccaactacgacaagaccatctccgtcatcgacctgaagaccttcaccgaggtgaagaaggtcgatgtcgccatcaacctccaccgcctcgagctggataactacgggaagatctgggtatcctcccgtggggactactataatgttccctcgaagatcttcgtcttcgaccccaagaccgagcaggtgacgaagacgctcgacgtctcctgctccaacatgacgctcgccggtgactccctcttcgtctacagcaccgaatggagctatatcacgggagcgaacacgatcagctacaccgtcatcgacaccaagagccaagaggtcatcgaccgcaacttcatcaaggacggcacggagaaggagatcaagatcccctacggcatcgcggtgaatagagagcagggagagttctacctcaccgacgctaagaactacgtgaccccagggcgcctccactgctacgacctcaagacgggtacacgcaagtggaccgtcaagacgggcgatatccccgcgcacttcgccttcacccgatacgaactccagcctctcaaacccgcaactccacaacagtaatgagacctcagtatatccagcgcgccttcacggcgctcgccctcatcgcttcgctctccttcgcagcatgtaagagcgatacccccacgccgcagccacagccggtcttccccaagcccgacgtcaatcccaatgcgacgccctacgtcacccgcgtccttgagtatatgcccgctgtcggtcagttcaccaacaccctccccgaatatgaggcaggtgacacacaggaggatatgaaccgcaaggccctcgagtacctcaaggacaaccagcgtagcctcgtcaccctcggtggctggggtggctacatcgtcgtgggcttcgaccacacgatcctcaacgtcccgggcaagcgtgacttccgtgtcctcggcaatgccttcttcggcaacgacaacaaggaggcctatgagggcgggagctgtgagcctggtatcatcatggtcgcctacgatgcgaaccgcaatggcctccccgacgaagacgagtggtacgagatcgaggggagcgcccacgtcgaccacaccaaggagccttggtataccctcgtcaagacgaaggtccctggtgcagacctcaacttctaccgcgacttcgagatgacctaccaccgccccgcccaggagcccgagtccaaggacggctggggcacctacatacgctgggaggacaacaagggcaactccggctacaaggtcaagaaccagtggcacgcacagccctacttcccgcagtgggtcaagggcgacaagctcaccttccgcggtacgcgcctcccacagaactcccaagaccagagcggcgtcggcacgtactatgtgctgtataagttccgctacggctatgccgacaacgagctgaacgaccgcaaggactccgccatcgacatcgactgggcagtagacaagaagggccgtaaggtccacctccctggtgtcgacttcatcaagatatacacgggcgtaaatcaggagaacggctggctcggcgaatgctccaccgagatctcaggcgtcaatgacctccacgtcctcaaggaagacatccctaactaacttcactaacctcctccactatgtacaagaagatcctcatcgccagcctcgctctcatcgctggcctcgcctcctgtaagaaggacgatcccacaccaagccctaatcctccctcaggtctgacgatcgacggagtggcaagcaccttagagttctaccagctcgacaccgctcacctgagcgtcgctggtgtagcgaaggacgctgctgccaaagccgtatgggcagtgaacggcgcgaaggctgccgaaggtgctaccttcgacttcaccaccgctcacccaggtaagtatgaagtcacgctcactgtcgacggcaagagcgctaagcacacctacaccgtcgctccccgcttctccgaaggcgccttcctcctcaacgaagggaacttcggcaatgggacgggctcactgacctacatccacccctccaagaagctcgtcatcgatcaggcttacttccacatcaatggcacgaagctcgggaatgtctgccaagacctcgccttcgggaatgaccagatctatatcatctcgcagaacggccccaagaacggcggtgaaggcctgctaactatcgcccgtagcaactccctcgagaaggtcaaggtctacaacgacgagaccctcgcacagcagtggcctacgcatatcgctgtcctgcgcgaccagatctacctgcgcaccgaccgcaatgggatctaccgcggcacggctgatggcggcttcgtctccatcccaggtacgagcaaggccaagaagctgcgtatggcacagatcggtgagcgcctcttcgccctcacctccgacagcaaggtgctgatgatccagggtactcaggtcgtccgtgagctggacctctcacccgccaagccctcgggtatcgccgtcagccacgatggtaagctctgggtatctacgacgagccccaatgcgatcctcaaggtagaccccacccctgacaacttcgtcgccctcgacacacacgtcctcgacaagtccatctcctcgggttggtctgccacctccgccttcttcgctcacggcgacaagctctacttcacgggccaaagctccgtcatctactgccacgacttcgctacgaataagacctctcaggtcatcgatgtcaagacgatcgatggcgtaggtacgtccgctaatatgtactacaacagcctcggcgtcgatcctgctacgggcgaactctactacgcagccttcgaggacttcagcacctacaacaagaagaacgtgacgatggtcctcaaggccgacggcacgaagctccttctgaaggagaaggtaaattccttccccgcaggcttcttcttcatccctaatgcggccaaccgcactggggccaaccgatgatttatcctaattagttcacttaatattcacttgaaaatgaagaaaactctcctctctaccctcgcgcttattgccctcggtggagtcgtcaccagctgcggcaaggagcagaaggatgcgcctcagcccgctggcaacaccagcgctcgcgctacggagctccccgcaggcgagacgatcacggggtcgatccagaccgacagcctcgcccttgtagacctctacaagagcctcgacgggatgggctggtcgcactccaacaactggaatagctctcgccccgtagctacttgggcaggcgtccaggtaagcgacgtcgcaggcgcacctcgtgtcaccgccctctacctcggcggcaacaagctccgtggcaccctgcctaagagcatcggacagctcaccgctctgcgttcgctccagctgcagtacaaccgcgagctcacgggtaccatccccgccgagctctatcagctgacccacctgcgctcgctgcgtctgcgcttcacgagcctgacgggcgaggtatctcccgccatcggcaagctcaccgagctcgataccctcgacctcagcaatagccgctacgacctcagcatgtggtggaatggtgatcctgctaccgccaaggagcaccgccccaacgggaagaccctcacgggctcactcccccgcgagatcggtcagctgacgaaggcacgctatatcgacctctccttccagggcttcacgggtacgctccccacggagatcggcgcactgaagagcgctaagtacctctccctctatggctgtcacttctcaggtgagctccctgcctctctcggcgcactcgctcagctcgagttcctctccgcaggcctcaatgagttctcgggaagcctccccgcttccctcggctcgctgaagagcatccgcgagatccacatctcgggcaacaagctcacgggcgctatccccacctctctcggtgcactgaagacgctccagcagctcaacctcgcaggcaaccagctcacgggcactatccctgctgagctcgcacacctcacgggtatctacgtcatcgacctcaagggcaacaagctctcaggcacgatccccacggacctcggtggcgcacagcagagcctgctcatctcggtagacctgagcgacaacgacctcacgggcacgatccccgcacgcatcaagcgctatctgcccgatgcagctaagtacgctggcctgcatggcctgcccgactacggctacacgatgttcgtcctctcaggcaataagctcacgggcaagatccccgctgaatacctcgcttatcccaagacgctgcagctcctcctgcctcagcaggctggctacggcttctctaatgagcctaagtaactcctcccgcacacccgcccttagctctcgcagcacgagggcgggcgtgcctctatatttcaccccaacccacaactatgattaagaagtttctcccccttgccttaaccctcactctgggtctcgcctcatgtagcaagaccgacacgcccgtcgtacctcagagcggtatcacgatcaagagcggcgtcctctcagcctatcccgagaaggagatcgctgctacgggcctcgtctccctccccgaagtcaccgagatctctgccaaggtcttcgagggctacaagacgctgaagaccgtcaaggcccccaagctcacgaagatcggtgatgctgccttcaagggctcggcactcaccagcctcgagctcggtgctaccgtccccacgacaagcgatgatgccttcgaaggcacgtccgaagagaagaacctcgtcgtccctgcagacaaggtcgttgacttcgccgccttcgcgaagaagcaccacttcaagaccatcaatggtgcgcccatccctggcaccgagattgagatcaaggatggcgtacttgtcacctatcctattgacaagacccccgcagatggtgtcgtcaccctcgaggctaccgtcacggagatcgcagatggcgtcttcctcgacaatacgaagctcacggctatccacgcccctggtgtgaagaagatcggtaaggcagccttcaagaactgctccgctcttatgaccgttgacttcggtggtgcacagcgtccaccgctggctatcgatgagaccgacaagacctacggcacggctgaagatgccttctggggcacacccgaggagaaggtcctcgtcttcgatgagagcaagagcccgaacttcctgcagtacttcgagttcatcgcacgccaccacttcgccaagctcgacggtatcaccatccccaagagcctcgacagcaagtacttcaaggtcaagggcggcgtgctgacggacatcacgagcgctggtcagagctacctcgctggtcagggccgcaatggtgtcctcgtcctcccctcgagcatcacacgtatcgacaatggcgtcttcacgcagcgattccagaacttcaaggcgatctacgccgaaggggtgacagaggtaggtagcttcgccttccagcagacgggtagcctcaacttcgctcacctgcccaagctgaagaagctcggcgaagcagtcttcaccgacaacgcttcgctgacggctgtgaacttcccccacctcgaggagatcggacatatctgcttcaatggtggctccaacatcagtggcaatggtctcaagatcacctacatcagcctaccagctgtgaagaagatcggtcgcggagcattccacggcaattacaagaactctggtgtcgctgtcctccttggtgctatgcccgaggtagacttcaccccctacagcgatgatgaccctttccacgatggtagcgtagcctttggtcagatgaaggaccccgtcctctacgtgacccctgcaaataaggcaagctatcagatcaccgacggtaagtggaagaacttcaccgtcaaggaactgaaataatccccctataggcaaaggcgaggcagtaccacacccgtggctacctcgcctttcttcctccccgacccttagatacacgccgactatgaactaccgcatctacagcgtagcccttgccctcagcctcctcacggcctgcggtgataagcctacgcccctcccccagccgacgccgacaccaacgcctgtacccacaccgacaccagagcccacaccgcccgcctacaaggactatgagggctataccctgatcttcaaccaaggccttgccgctgtcctgacgagccagcccgatggcgtgggcgtggcctccagcctcagcctcctcgaccgtgaggcgaagaccctcctccccgtcttctccgacaaggccaccccgcttaataaggagtacgacggccagggctacctctgcgaaggcacgctgagcgaagcgggcgactatctggcctatatggcgaagtacgacttcaccgacgacagcgagcacgcctcacgcctcctcctcttcgaccgcaagacgatgcgcctcacgaagaacctacgtatcacccagcccgacggcgatgaatgggtgcgccactccttcaccttcgacgacggcacgacttacctctccttcgacaagaagcacttctaccgcctcgaccccgagacggggaagatgaccgccctcacggggatcttcggttatcctacaggggcagctgcttggggcgataagggctacttcttcgtgcgctatgagtccgcggccttcgccttcgacaagggaagcaccgccgcacgcaaggtacccattgccctctcgggagcacagatcaaggacatcttccgtatgggcgctcaggtcgtcctgcgtgacacggcgaaccgttattacctcttcgacctcgccacggggaaggtcctcgctgtcttcacgctcagcgaacccatcggccgcagcgtcaccatcgaccccgccacgcaccgtatctattactcgggtggcacgcccaatctcaacggcgccgaggccaaggagcgcagtgtctacaccgccaccattgacaccagccgtcccgcaagtgaagtacagggcctcacctcacagctcctctacaccatcgcagggcgtaccgaggcgaacaaccgtcagggcttcaagatgcaagtcggctatcatccctacctgaatgtggtgctggtgtcgtacctcgaccaaggccgctcgggtcccctcctgcacgacctgacgaagctcctcctgctccagctccccacgagccccagcgagagcgtgaaggagctacgcaccttcgacctccattacgcctctgacgtcagcctcttgagcgtcattcgcccccgccccacgaagtagccctctgataggctcacttcttacttgtgtattaggatctccccgaggatgcgcctcccgctcctcggggagacttctttttctcagcaggggaaaggtgccccaagcgaatacatcacaacatgctgtactacagctctataccgcacacctgtacaaggaggggaaagtaaccagtactggtcactcgtctgaccagtactggtcgcagcgcgaagtagtagtggttgatatctgttaccagtactggtcacgtcggcgaccagtactggttcgcataccccccctcccacaagtatagccagcaagccccctgacgtatgcggatagccgtgcgtcagggggctctttctttgcgcatttgcagtggtgtttttttactaagtttgtggtagataactgagtccgagcgatccttcggctcgagaggctttacctaacgcatcacccgcctcccctgccgcacgaagggcctcacaccctcatacctcaaagacaatacaccacgcgacaaacgcctaaggtgcgccacgacgagggccgcaccataccacgctaacccacgatcacccaaccccatcggaaactatgagactcgtaaaagccttcctgctgtgcttatcaatgcaagccttgacgctgtccgcccagatgttcaaattcccgacctcctacgggccatcggataagtaccaagtagtcgatactgccaagtatgagatcacctatcagatcgcagccaagctcaatcccaaacctaagtatagccacatcgcctataaggacacgcagacgctactcatcggcaagcgtatctctgcgacctatagccgtgatatcctaaaagcccgcgagaaagcggatgccgagataaagcagggcgcggagacggtcgatgactttagtggtattaccttccccgaagatgtcttcaagggctaccccaagccaggtgtactgacgacctcctaccgcctcttcctcagcgcgggctacgggcaatataccgaggcattgcccgacttcaagtggcagatccagtcggagactacgaagatcctcggctacacgtgtcagaaagccctcggggaattccgtgggaggaagtacatcgcttggttcacctcagacattcccctctctgacggcccgtggaagttctgcggactgccggggctcatcctggcggtacaagatacggaggcatactttgtcttcacctgcataggcgttgataataagagcacaccgatccgcttctggacctacccgcacaccaagtctacgcgtgagaagctacgcgcgaccatcctacgcatgcacaagcagccgatcctcttctgcgagcagtcgcttggcatcaacatttacatagggaataccaataagaatcgagacttctccttcccttggctatggctggaggcagagtagcaccccgcccttcactcaccttactaccagcgctatcatgaagcgacgcatcctcttcctcctcgccctcctactctctctgtcatcctcctacggacagagtatcatcacggggcacgtacgcaccctccaagggacgcccgtagagtacgcccgcgtgctggccttagtgccgacggacagcacgatcttagcctacaccttcaccgatgccctcggcagctaccgcctaagcgtcagcagcacgcagccccagctcctcatcagcgtagcgagcatggagatcgagcgcatggaccgccgcgtggagaacgtcagccagacctgcgacttccgagtcaaagagtcacgcaccctcctaagagaggtacaggtgaaggctcgtaagatctgggggaagaaggacacggtcaattactccgtcggcgccttcatcgggaagaatgatgtagtcatcgccgacgtcctgcgtaagctcccgaatatagaggtctcggtggacggcctcatcaagtaccaagggaaaccgatcaataagttctacatcgaggggctggatgccctgcaagggcgctacggcatcgcgacgaacaacatatcggccaaagacgtcgccaccgtgcaggtcctcgagaaccaccagcccgtcaaggcgctcgagaagaccctgcccagcagcgatgccgccatcaacctcaagctgaaggacgaagtcaagggcaccttcagcatgacggcacagctcggcctcggctatgacggtagggtgaggcgcagcgaagagctgatcgggctatacttctccaagctgcgacagcacgtcttgactgccaagagcaatgataacggggaggacatacgccgcgagttgcgctccttcaccgcggactctcccctccccagcctcacgatgacctcactacagcagcccgacgagccccgcatctctcgccctcgctactatgacaacgacacgcacgccttctcctccaacaacctctacaagctgaagaatgaagcggagctgaacgccaacctcatcttcttccacgaccgagagcgcacacatggtgcctcgcagacgacttacttcctacccgagggcacgaaggtcttcagcgaagacctgcgcaatcgcggtacgatcgaccagctcgagggcgagctacgctacaacatcaataaggagcagctctacttcaataacctccttgagctcaaggcctcgtgggagcaagagcacggcatcgtctcagcgggagaggacctcacacagcagatgcgccagcgctacctctcagcgaccaacacctcacactgggtgcggacgaaggcagatggcaagggcggtgagatcctctggcgcaatgccgtagcgacctccccgcaccgtctaagcatccagcctgggctctatgccccccgcatcaatagcggatcgccctatgccgagctcacgcaagacgtacggcaccgcgccttcctcagcttcgccgagcttgccctgctctccgcatggcatatcggggggctacacatcagcccacggctcttcctccaagcccagcatcaggcgctggataccgagctgggagcgacgagcctcacgggtacctatcagccactcccctcgcgggatatgcacaacgggatcagcttcactcgccttggtgctgggctgggtcatgagctgagctacaagtccgaggtcttcagcctcgacgccgtactcccgctcttctactaccacacactgatgcaggacggcttccgcccaagcgaaaggctctcggaggggaagctgtacttcgagccgcggggctgggtgagctataagttcgcctcggacttcacgctcaagctgaatggctcgatagccctcacacagcccaccctcagctcgctctacgcagggtatatcatgcagagctaccgcagcctgacgcgccacgagatgcgtcagttcagctcgcgcacggccagcacagggctcacactcagctacaaggatatcttctcgatgctcttcctcagcgcgggggtcagctacagccatcaccgcagtgaagccatctcttcgctgaagatcgagcccccactcaccgtcatagagcgccttcccctgccgcactcggggcagagctattcggccaatgcacgcttcagcaaaggctatgactggatctccctctcggtctctggggatgcagccctcggccagagcgagggtaagagctatctcgagggcaagctcctcggctatacgagtcagtgggccagcgccagcgggaggtgctccctcaagccgctatcatggctcacgatggagtacaacgtcgcatggggcctgcaccgcagtcgcctggagaataggagctggctcacacccatacagagcctcagccacaaggtcatctcgcacgtgaatgtcctcgaggatgtcgctatcaagctcaccgccgagcactactacaacgatgcagtgactgagggacggcacttcacactcgccgaccttggactcgcctacacgtggaagaaggtgcgccttaccctcgactggacgaatatcctcggtgcgcgcctctacagctcggggacgctctccgacctcgtcgcctcgcacagctactacgatatccgcccttcggcgatcatgctgaaggcgcgactcaagctcttctaatcctccgaataacctcaagcaatcaaaccgatagcagtaagcgcaaacattagctttcaaatgagagagggtattgagtactctttacttgtgagagcttgcttaataccctctttttaaagtataagtactatgaaacggctagtattcattgctattctatttcttgtatccacatcagctctgttggcacagcgagattgtatcttcaccacagctcgctctctagctagatacaggactctagacacagcgcgatatcttgtcagatataggtacatatcaaaagcttccacacagcaggaagtggcagacgaagatgtcgtaacactccagattggagataggtacaccaaatcctatagtgagaacctataccagacagactctgtcgctaccatcatgctaaaaaagggggcacgagtgctacctacatattctaactatacgcaaagggaggatatatatacctgcctagaggataaatctgtgaccacggtatataggatgttctctgatggtccagtcttacgctatcaggaacccttacctcagattaagtgggaattgtctagtgaaaagaagactatcctaggctattcttgccaactagctacctgtcgattccgaggacgaaactatagtgcttggtttacactcgcactgcctctttctgctggtccttggaagttctcttctctccccggccttatccttgaggtctatgatgatacaggtgaagtaaagtatacagcagatgagattttacacaggacgaccttcataaagctctggaattggccttatacagataccacaagggaaaaggctaaccagaccattgcgcgtatgttccgtaaaccaactcagttccttaggtcgataggagccccccaggtattcacacccaatggccctcttggagcaaattacacttgcccctataatcctattgagttggaataaaccctctctatctcccttatgatactattatgaccatcaaaagaatcgcaattgtaatgtctgtcctgctactatgcctcgacaatcttcctgcacagtgggcgacctgctacgagccgttatcggcttcaaaagttttggatacggcttcgtatgaggtgctataccaagtccagatgcgctggggaaaaagaataataacagacacgatcagcctactcattgggaaaaagtatacccagacctataacccagattaaaacgaatgaggctacagaaagatagtttgtttaaacttggtcaaaatgccccaagcgtatactttctcacctttcctgaggatacctattgcaacttggagacgggacaaattacagcagtctatcgcagttttgagcctggcccacctctgaaatataaggaacctactccgaagtttaattgggtcacatccgctagagactctactgtactcagctacccctgctcagaggcacaaatgagtttcagggggcgagactatagagccctctttacaatgaatattccactctcggtcggaccatggaaatttggagggcttccaggactaatcctgaaagtagaggatgcgaagcaagattacatcttcagagccataggcatcagatcggtcaaagaaggcatacatctatgggactggaagtatcaagagaataatcgaaaggacatacgcaagtatgtagagagaatgcacaagaagcccaaaacgtatatgcgcatagtgaccaatgggatggtgatgtttcgagatggagatgaagataacgtttcgttcccctacaatcctattgagctggaataaaccctctctatctcccttatgctactaccgcgatctgaccaatggcacgacgcaggtctcctacaggacgcctctctcaggccccacgctgaagtacaccgacaccccgacgttcttatggacgctaacgggtgggaagaaggtcatctctggctacgaggcacagcgtgccacgtggcagttccgcgggagaagatacgaagcttggtttactcccagcatcccgatctccgctggcctgaacttctttggcggcctctttgggctgatactcgagctacacaacatagatggagcacttcgacgatcatgctgaaggcgcacttcaaactcttctaacggtcacatctccatgaagtccttcgcattctccttactcttactctgcatctgtctgacctcccgtgctcagagtcccatcggcagtatacaccccttcgatatcaggaaatacaccgtcctggactcagcgaactatcgcattgactacaagacgacctgcctccttgacccgaagaagcacgacaaggtgacgaacgagatgtacctcctcgtcgggcggaagatctcgaagttcggacacgtctgcgtcctggacaaccagcaggagcttatcgcagcagagagccaagaggctggacctggtatcgaggcgcggggaatgggaggtatggaggtctataagtacctgagcggcaccaagccctatagcgagcttacctttaggctcttcatctactcctaccgatataccctcatctactctgatgagctacacccccagtcatggacactcaccaatgagcgcaaggacgtactcggctattcttgccagaaggcgacagcgcgcttccgaggccgtgactataccgcttgggtagcgacggatatccccatctctaatggcccgtggctcttgggtggctctcctggactgatcttagaggcttatgatgccaagagggagtacatcttcgaggcaacaagcatctcacagctccccaaggccttgcccatcgtcaagtataaagacaactacaagcgcacagatcggagccaagtccgtgatctatgtaggcgcatgcatgccgatatcgtgcagacgctcacgacatctttccctcgcgcaggcatccaaatcaaaaacccgaccttctactacaaccccatcgagctggagtagctgatgggatgacacatcatatcagactgccttatgcgaaacctctttctcctcttactcaccttcgtgagcatcagccccctcggcctgctcgcacagctccctgctataccgatgcgcctgcaagcagggaagatcctcgggaagtccgagtacttcgtggactacacctaccgccacaagacacctgccgagagtaaagacttccaagaagacatcatccgcgtggagctgggcaaggcgcttgtcaagtcctacagctacagactctggcaggcagactccctcttgacacagatcaccaaccccaacggtacgatgcagacccccgaaggcggtctgtctcccttctgctactaccgcgatctgaccaatggcacgacgcaggtctactacaggacgcctctctcaggccccacgctgaagtacaccgacaccccgacgttctcatggacgctgacaggtgagaagaaggtcatctcggactacgaggcacagcgtgccacgtgccagttccgcgggagaagctacgaagcttggtttactcccagcatcccgatctccgctggcccgaacttctttggcggcctccctgggctgatcctcgagctgcacagcatggatggaacgcatcacttcgtactcgacgccctatgtcagcgtagtgcggacatcgtggagtggaagattcgcttggtgaagtcggtcagtcgcgcacagttcagagactactatcagcggctacacaagcatccgattcagacctttgaggccaatggccagcgggtatatccacgggatgcgcaggggaagttcctgacggctggcgaaacactctcttggacgatccccttcaatcccatcgagctggagtagcctccacctcacaccaagccgacaatcccgctcctcggggagatttctttttctcagctgggaaaggcactccaagcgagcacaacacaacactctgtattacaatcccataccgcacacccacacaaggaggggaaagtaaccagtactggtcactcgtctgaccagtactggtcgcagcgcgaagtagtactggttgatatcagttaccagtactggtcacgtcggcgaccagtactggttcgcatatccttctcctcttcttgtcgtgacagcctttcgctatagctctatctatgatagacaccgcttgcgccaccaccctaccgcagggtgataaatcgacctatattggtcggcgggctgacctatattgctccgacgacgaagctatataggttcacaccacgaacgagtattcgtttgcatcacctcctccgcaaacctggattctaccgccccatagaaattcgtcatacccctccttgcctctttgttttgcgcaggaaaaggcgattctatatttacccctaatagccacatcccccccctgtaactcacaaagacaactttatgtatatttgctatgagcaatagataccccaaaggcacaccctacagagatcagccccgatgccattgagatgtctacaacacccagaattacaaatcaaataaggatcagtatgtataaagaaactgctcccgcgaccctaggcatggacgagtacattaagatcaagaagatccaaaatgtatttgcccttgacccagcaacggggaactatgtccatatgaaggatggaagtgaattttacctctctctcaatggtgtacaaatcaatatcgattttaagccctacagaatcgtacaaggcacttggcctgaatttattgcaacaatagagaattatattggagtatggtggaagggcagtagaggaaagaataaactccaaatatatttatcagaaggagagctatttaatgtgtttaaggaggtctattccttggggcctcaaagtacctacataggaaaacgtgatcaagaaggacataatctcatttctcctatagacggtaaagaagtcctcacaaaaagagtcccatatcgcctctacgaagagaatggcctgatctttggctatagtaaaacaaagatccatcgcttagatcacaccggtgatgttatttggacttgttccttagatgctgtagcaagtaaaaagtacgagataatcgggatagcacacgggatgctgtggattcaactaccagacatcatcggtatcaatatagaaacaggtgagatctctcatcaactatccgattgttatgcacatatagcaaataaatatcctgagctttatcgggagcgaacatgctatatgcgagaaacagacaaagccatcatagccatcagctgcttcggtgttaagatctttgacacggctacagcagaatgtattgaaagctatttcttccaaaatgtagatcctcttgggataggcagctttttattctactcccttcctatacttcaagggaatagtctcaccttcgtcggaactccaatggaagagagatacctatatctcgccatgagtggtgattgggctggaatctttgacctcaagactcgcaagatgacatgggctgatagtgtgattcccaggcaagaaaagagaactacctctcgtcgccttgatcccaagatgtcacgcctatatatatcaggagataagctatatataatagactttgattacaccttgtacatctaccaacggaagtagctaccccagagagagaaacgaaaacccacaggctctgtaactgaaagtagaagcctggacatacccattcttatagagaggtgataagatacacgggaaagatggtgcattcccaccaccatctttcccgtatctttgttgtaatgggggcgactttgccccacctccctcagataagacacgatgacgctcgacgaaatacgcaagatcctccctacgctccccgaagcccccggctgctataagtacatcggccaggagggcacgatcatctacgtcgggaaggcgaagaacctgcgtcgccgcgtcagtagctacttccagcgcgacgtacccagctcgaagacccgccttctggtgcgccagatccgcggtatcgagtacgtcgtcgtgggctccgaagctgaggcccttatcctcgagaactccctcatcaaggagcatcagccccgctacaacatccttctcaaggacgacaagacctatcccgaggtcgtcatccgccacgagcccttcccccgcgtccgcgtcgagcgccgccccgcccacgatggctcggtgcgcttcggcccgtaccccaacgtaggtatggcacacgccgccgtagccatggtgcgcgacctctacccaatccgcacctgcgaccttgacctctccccgcacaagatcgcccagggcaagtacaaggtctgcctcgagtaccacatgaagaagtgcaaggcgccctgtgtcggctaccagactgccgaggactacgcgcacaacatccgcgagatcacgaacctcctgcgtgggaacctccgtgacgtcatcgacctctatcgcgaggagatgcttcgcctcagcgaggagcttcgcttcgaggaagcgcagatctacaaggagcgccttcagtacctcgagaactatcaggtcaagcacaccgtcgccccgcaccacatccacaatgtcgacgtcttcagcttcgacgaggacgaagacggcgcgacctacgtgaacttcatgcacctcacccaagggatggtcacgcaggtctataccatcgagtaccgtagcctcatcgaaggcgagacgcgcgaggagctcttcgccagcgccatcaccgagctacgccagcgcttcgcctcacgcgccaaggagctgatcttgcccttcgatcccgggtggcaggacgatgccagcgtgacgatcaccatcccccagcgtggcgacaagaagaagctcctcgagctctccgagcgcaacgtccgccagtacaaggtcgacaagtacaagcgtgccgagcggctcaaccccgaccagcgcctcatgcagatcgtcaccgagctgaaggacctcctgcatctggataagctccccctacatatcgagtgcttcgacaactcgaatatccaaggctccgatcccgtagcagcctgcgtcgtcttcaagcgcgggcgcccgtcgaagaaggactacaggaagttcaacatccgttcggtcgaaggacccgacgactacgcctccatgcgcgaagtcgtcacacgccgctaccgccgcctgagcgaagaggcaggaggcgaaggtctccccgacctcatcctcgccgacggaggtaaggggcagataggcgccatacgcgaagccctctctgagctgggcctcgccatccccgtagcggggctggtgaaggacgaccgccaccgcacggcagggctcctcttcggcacggacaccctcgatgagatccccgtgcgccaccacagcccgaccttccgtctcctcgagcagatccaggcggaggtgcaccgcttcgccatcaccttccaccgtgacaagcgcagtaagagccagctctcctcacgcctcgactacatcaagagtatcggcccgaagacgaaggacgagctcctcacggccttccgcagcgtgcaagccatcgcctccgcgagcctcgacgacctcaccgccgtcatcggccccgccaaggcccgcatcatctacaccgccttccaccccgaaaactagtactcataatcatattaaacaaagacatgccagaaacatctacacaggtaaagcagatcagataccttggagataaaagagttcccctcaaggaacttagaaaagaattctacaagattcgaaagtttgagatacagaatctttggcagcgctccatattcttaatcacattcatagtcatacttatcacagggtatgctaatctcacagaaaagcttctattagaacgcgacaaatggctaacaaacagcgactttagcgatatacacatccacgtgatttgctgcattctagctatcttaggatttatcttctcatccatttggattatgatggccaagggatcaaaagcttggtatgaaatctatgaaaagagaatatgtcaaatagagaaggagctccaagtcagagtagaatacaagatgcagcctggagcaccatggagattagataattctttcctctccacagacccaggaacctactctgtatcgagaataaacattatgttgggacaaatcctactcttcatctttgggggagcatcctgcatacatattggctgcataattgggctaatcctcacagacacccgttatgtaattcttgcaataatctcagcaatcttaatactattctttatcacaggtcccttcctcaaaaggttaaaaggcttagcacatagcaaaggaatcataaccctcgaaaaagaggaagaagaggctaagaagattcaacaagaacaatctttcctatgcgatttctcattcaacgtacccaaatgggtagcgtctctaaccaaaacacaatcctagccgagagccacggcctcggcatgctcatcctcatcggcatctctcccgacgacaccgcggaggacatcgagtacctcgtgaagaaggccacacagctgcgtatcttcgacgacgaaaacggggtgatgaaccgcagcatcctcgacgtcggcggggacatcatcgccgtatcgcagttcaccctcatggcggagacgaagaagggcaaccgcccatcctacatccgtgccgcccgccccgaggtcgccgagcccctctacaatgaggctgtccgcgcccttgaggagcgactcggtcgccccatcggtacgggtcgcttcggcgccgatatgcaggtgtctctaacgaacgacggccccgtgaccatctggatcgacagcaaggcgcgcgagtaaacagcgaagtgcaccgcaggaaagcgaagaaaacagaggtacgttccacgtggaacactcacccactccacccacacatcactacaccaagccacaccctatgacccagagagagcgacgccaagcaggactatacttctgcgccatcgaccccgagatccacgaggagcgactgcgagcacaagacctcatccagcggtacaatgccttgcgccccgacgagcacgaagaagccagcgagattatccgctcgctcctcggcacgatgggcgaacggtgccacttcgtgcctcccgtcttctttgactacggatcgaacgtccacatcggagacttcagcttcgccaacagcaacttcaccgcgcttgatgcggggcgtatcgatatcggccgccacgtcttcatcgggccgaatgtcagcatctataccccgacccatccgctactcaccgaggagcgcaacacaggctacgaggaaggcaagcccgtgaagatcggcgacaacgtgtggatcggcggctcggtaacgatcctcggtggtgtcaccatcggcgaaggtgccgtgatcggagcaggcagcgtcgtcacgcgcgacatccctgcaggcgtcatcgccgttggcaacccctgccgccctcttcgcgagatcaccgacgctgatcgcgtactccacgacatcgagccctaagcatattatatacgtacgcgcgcgaagcgcgagaggacatcgggtgcagttccacgtgagcagttccacgtgaaacgcacccgatgcttttctttcataaagcgtgggtgaccgcactccccacgcaagaaacccgtatctttgcagccgaagaaacccaactaagaaaggatgctcagcgaagacttgctctacgaaaaggaagatgagatctacgacaaggtagacacccccctctttcacctcatcggcgaagccgcggacgaactcggcgtagacgcctacatcgtcgggggctatgtgcgtgacctcctcctctaccgcccctcgaaggatatcgacgtcgtctccatcgggcgcggcatcgacctggcgcaggcggtagcggggcgcctcgggcgtggtgcacgcatctcggtcttcgctcgcttcggcacggcacaggtcaagcagggcgacctggagatcgagttcgtaggcgcccgtcgcgagagctacacacccgacagtcgcaagcccttcgtcgaggacggcacgctggaggaagatcaggagcgccgtgacttcacggtcaatgctctggccatctgcctgaacgccgaccgcttcggtcagctcgtcgaccccttcgacggcctgcacgatatggaggcgctcaccctgcgcacgccactcgatcccgacatcaccttcagcgatgacccgctgcgcatgatgcgtgccatacgcttcgcctcgcagctcggcttcttcatcgaccccgacaccttcgctgctatcgggcgaaatgcagggcgcatcgagatcatctccgccgagcgcatctcgacggagttcaacaagatcctcctctcccctcgcccatccatcggcctcgagctcttcgagaagaccggtctgatgaagctcgtcttccccgagctcctcgagctcaagggcgccgagacgcgtgacggcatcggccacaaggacaatctcacccacacctacaaggtcgtggacaacatggccaaggcactctccaccgcccgccctgggcacgagatgaatctctggctcctctgggcagcgctcctccacgacatcgggaagccccgcaccaagcgctttgaccagcgcctcggctggaccttccacaaccacaacttcatcggcatgaagatggtgtcgaagatcttccgccgcctccgccttccgcttgatcacaagatgcactacgtggagaagctcgtcgacctgcacatgcgccccgccaccctcgtcgatgagggcgtgacggactccgctgtgcgccgcctgctcttcgaggcaggagacgatatcgacgacctcatgctcctcgtcgaagccgacatcacgagcaagaatccccagcgcgtacgcaagtacctcgacaactacaaggttgttcgtcagaagctcgtcgacatcgaggagaaggatcgcatccgcaacttccagccgcccatctcaggccagctcatcatggacaccttcgccctcacgccttgccgcgaggtaggactcatcaaggacgccatcaaggacgctatcctcgacggcacgatccccaacgaatacgagcccgcctacgaatttatgctccgcgaagcagccgccctcggcctcactccagcgaagaaataggcgcacccctaccccacctcatagagataccactatcccttgctttacgatcttgtcgtaaagtaaggggcagtggtttattatcagtacctttgcaccatcaaaaaaggatagtcgaccgactgtctcgattgcttagaagaaggaatatatttatgatcgtaacaaagcgcgccaacgatcccgtctggacgaacatctatgcttatgcccagctgcccgctgagctgcgtagactcgacgagatcgcccacaacctctggtgggtatggacccccaaggcacagaatctcttccgccgtatctctcccgaactctgggagtcgaccgaaggcaatcctatcacgctcactcgcctgctctccgccgaggagatggcagccctcgtcgctgacaaggacttcatggcgcagctggacgaagtctatgccgacttccaggcctatatgaacgagcctgcagatgcagtacgtccctccgtcgcctacttcagcatggagtacggtctgacgaatatcctcaagatctattccggcggtcttggcgtcctcgctggtgactacctcaaggaggccagcgacagcaacgtccgcctcaccgccgtcggcttcctctatcgctacggctacttcacccagagcctcacccccgaaggccagcagcaggcgaactacgaagcccaggacttcacccagcttcccatcgagcagatcttcgaagaggacggacagacgcccctcatcctcgaggtgccctatgctggtcacatcgtatacagccacatctggaaggtaaacgtcggccgtatcagcctctacctcatcgacaccgacattccacagaatagcgaatgggaccgccccatcacgcaccagctctatggcggtgactgggagaaccgtatgaagcaggagtacctcctcggtatcggtggtgtgctcctcctcaaccgcctcggcatctcgaaggacgtctatcacatgaacgaaggtcacgctgccttcatgagcgtacagcgcctcctggactacgtcgagggcgaaggtcttcccttcgacgaagctcttgagctcgtccgtgcctcctcgatctacacctgtcacacgcccgtccccgctggtcacgactacttcgacgaggagctcctcggcaagtatctcggtcacatccctgggcgtctcggcatctcttggcacgacttcatcagcctcggccgtgagaatcccgagagcaacgagaagttctccatgagcgtcttcgcactgaatacctgtcaggaagccaacggtgtgagcctgctgcacggccgcgtctcgcaggagatgttcgcccccgtatggaagggcttcttccccgaagagctgcacgttggttacgtcaccaacggcgtccacctgcctacatgggcctctgccgagtggcaggagctctacacgaagcacttcggcaaggacttcatcaagaagcagaccgaggaagctacctgggcgaagatccagcagctccccaacgagacgatctgggagacacaccaggcgatcaagctccgcctcgtcgagcatatccgctccttctacggcgagaagtggctacacaacagcggtgatcccgagacgacggtatccgtcctcgaaggcatcaaccccaacgccctgctcatcggcttcggtcgtcgcttcgctacctacaagcgtgcgcacctcctcttcaccgaccttgagcgtctggagcgcatcgtcaacaaccccaagtaccccgtacagttcctcttcacgggtaaggcacaccccgccgacggtggcggtcagggcctcatcaagcacatcctcgagatcagccgcctgcctcagttcctcgggaagatcatcttcctcgagaactacgatatgcgccttgccagcaagctcatcgctggcgtagatatctggatgaacacccctactcgtcctctcgaagcctcgggtacctcaggcgaaaaggccgagatgaacggtgtcctcaacctctccgtcctcgacgggtggtggtacgaaggctaccgcaagggtgctggttgggcactcaccgacaagcgtaccttcgctgatcagtcgctgcaggacaagctcgacgctacgacgatctacgaccttctcgagaaggagatcgtacccctctacttccagcgcgatggcaagccctactccgatggttgggtacagacgatgaagaactcgatgaacttcatcgctcctcactacaccatgcgccgcatgatggacgattactacgagcgcttctacacgaagctcgccgagcgctcagctcgcctgcacgcagactcgaaccgtatcgcccgcgaactcaccgagtggaagcgcactaccgccgaggcttgggatagcatgcaggtcatctctgtcgagtgctccgagagcgcagcatatatgtccaacgagcgccacacaggagacgaagagacggtacgccttgtcctcgacaagggtgcactcacctcggatcttgaggtcgagctcgtcgacgcacgcgaagatgctcagggtcgactccgcttcgtagcgaagactgccctgacactcgtcgagcgcaatggctcacgtgaggtctacgagctccgcttcaagcaggctcgtcctgggcactacaagcgcgctctgcgtatcctgccttcgcaccccgagctcccacatcgtatggacttcgcgctcgtgcgctgggtagcccttcagtaagggtctcccctaccccatcactttatacagcacgtcccggcagtcatctgactgtcgggacgtgctgtatatacacggctcttgtagctcactacgccccgcacatctacggggagcaagtagccccttcatgaaagaaaatcctcatccaatacaagcactcccctaccccagcggtgcgattcttgcgaagcagcgggagataagctccatccacgtcggtagtcttatcgtccacgtgcgtggatctttggatttaggcacgtagatgataggactacgcacatagccgaccaaatagcactaaaggtgccgccctttctttccgccccgccgtacttttgcctcaggaagagcagagagcttctcctatcagtaagacaagtaccccaatacacgacacgacgatggcaaagtacacaatgaggcaagttcctcaaggccttgggaagcatcccagccagcaccctcgcctgatcagcgaaggacgactcagcaccgaggacatctccgaacgtatggccgaaggctgtaccttctcacgcgctgaaattgaaggcgtactccagctcctcggcgaagagctcgctaagaggctcgcagacggctatatcgtacatatcgatggcgtggggagcttccgccccaagctcggctaccgcaaggaggttgctccccccgaaggcgaagagactgcgacacgcaatgccgccagcctggagctcgccgatgtgcgcttccacgctgaccacagactcgtacagcgcacccgtagggtctgcaggctccagcgcgccccgcatcgcagctacacgcgccctcgagaggggcgtgagcggcgccttagccagctcctcagctatctacacatccaccacatcctcacccggagcgaatatgtgaagctcacagggctctccccgacggccgccacagcagagctaaagtcctttgtcacagcgggtcatatcctgcgaaagggcatcgcttcgcactcgacctatcgcctaccctactcttcggaaaacgagtaactttaccccagagaaaggacatcatccctccacattaagtcacacaaacacgggctattcaccatacgtaattacctctatctcatcctattccttcttcttgggacaagctgtatctcagcccaaaagcctgtcgtcacgatccacggacacaccttccacctcggcgatagcctcaccataggtctgccccatgatgatgatcccagcggtatttacaaagcactctcttggtcgcaggaagatatggagatccccaccttcgcaaaaggcgaactcaagatacatatcaagccctttaaaatgaatgtattcggcgagaggctcaatgagccagataccgtgtacttcctcagcctcccacagttccccaaggatagcctcatcatcgacctcaaggaagccgtagagcgtggggagatcctgacggagcccatacgggaggataagacgctctatccagaggccgtagagctacgcccctcagactatatcgtggctcttatcaagatcggcaccctaacctacaccgacgaagtcatccaggtatacgccaaaaacttgaaggacagagagcagacgatcgatgacattgacgatccccgcgagtttcagagacagcgagcgcccctattggcgaagctgaaagcagccgtcgagaagtttgatctcgatcgggtctactacctgcgacacaaggtcatcaccaggggatacgaccccaagcgctcgggctatgcctggcagccaggagtagacggccccctacctgaccccgatattatggggaaggaagcgatcagaccatccttctttacagaaaaggaagttcccttcatcagcgtccctgctgaccgagcggagcgctttgagaagcgcacagatacaaaaggaatgggtatgcaggcattctacgtcaagtcctatatccgtatcgccccagggacatcctatgtagcggatcagcccctcatctacatcctccccgtagattaccttggccttgatgcctacgaatacccccactgcgcctactaccacctcggctccagcaaggcggtggaagtgccctaccacccatagcccgcaaaaaagaagtaactttatccataggaaaaaggctttgacacacctccaactcacacaaatacaacctattccttatgcgtaactacctctatcttttcctattccttctgcttggcacgggctccattgcagcccaagagcccgtcgccaccatcaatggacacaccttccacatgggcgatagcctcaccataggcctgccttatcaaccagaagagcggtatcaaaatgagcctagcaaaaggtacaaaaccattagacatccatcatgggaggatagggagattccagccttcacgagaggaaaactcaagtggagtattcctgcccctaagaaaaacatctttggaaatctcatcccgcaagacactgtgtacttcttgagtctcccaaagtatcctaaggatagcctcgtcgtagagcttgccagagccatacagaagggggaaatcataactgacccgatagagcatacacctctacacccagaggccgtggagcttctacctgcggattatgtccctgcacttatcaaagctggctacacgacatactcggatgtagcgctcaaggcatacgctcaatctttgggggatagcgagtcatcgccgacctctaatcccttcgaataccaacgacaacgagctaatcttttagagaagctgaaggaagccgtggagaagttcgacctgaatcgaacttactatgcaaggcatcagttcaccaccgaaggatatgacttcacacgatctggctacccttatggagagttatatgggtctacactcccctacctctctactccaggtaacaataaggtctcgctctacctcaccactcaacagagaataaccttcatcagcgtacctgcagagcgagctgaaatctatgagaagcgctctgggactctggggaataatgctcatacgctctatgcacgagtttacttccgactactccctgcagagagctatacggaaaatgatagccatgtctatcggacgaacatcaacttactcggtcttgacgcctacgaatacccccactgcgcctactaccacttaggctccggcaaggcggagtaagggtcattctaagccctatcacaaaggtccagaggagctgtgcaaaatgtactactcctctggatcttcttctttcacttaattccatcgataaaagccaagactttacccgctttatataaggactctggcgctcggtcttactttctttgtacctttgcgtaaaatggtaaaatagagatagtgtatgaagctgtattttattggtatcggtggcataggtatgagcgctctcgtgcgctacttcctcagcaagggagatagcgtagcagggtatgacttgacaccttcgcccctcacacacgccttgagcgaagagggtgctaccatccactacgaagacgatcccgagctaatccccgagcccttccgcacaaaggataccctcgtcgtcttcactccagccgttccccacgaccaccgcgagctggcattcttccgcgcacagggcaaccgtgtgatgaagcgtgctgagctcctcggcgaactgacccgccgtgagcgcgggctctgcgtcgctggtacccacggcaagacgacgacctctaccctactggcacacctcctgcgctcgagccacgtcgactgccacgccttcctcggcggtatctcgaataattaccagaccaactgcctcatctccgaccacagcgactatgccgtgatcgaggccgatgagttcgaccgctccttccaccatctctcaccatacatcgcggtgatcacctccgcggaccccgaccacctcgacatctaccatacgcccgaggcctatcgggaaagcttcgagcacttcacctcgctcatcagcgcagagggtgctctggtgatgaagaagggtgtccccgtgacgccccgcctcaaggaaggaacgcgcctcttcacctacaccaccggtgccgacgaagcggacttccgtgccgacggcatcgagatccgtgatgggcacctcttcttcgactggcactatcccgctatcgaagggcgccctgctggtacgctccacgtcgagctcggtgtgcccctcctcatcaatgtggagaatgccgtagcagctatggccgtagcctacctctgtggcgctaccctcgaagagctggccgcaggtgtagcctccttccgtggggtctatcgccgtttcgaccgcctcatcgatgatccccgctgcgtgctcatcgatgactacgcccaccaccccaatgagcttgatcccagcatccgctcggtgcgtgagctctatcccgaccgcaagatcctcggcatcttccagccgcacctctatagccgtacgcaggacttctatcgggagttcgccgcgagccttgaccagctcgacgaagtcatcctcctcgatatctatcctgctcgcgagctccccatcccaggcgtcacttcgcaaatgatcgccgacgtgatgaagcataaggatgtgcttgtcctgcccaaggaaggcctgctccccgagctcaagaagcgtcaggagctccccgaagtcatcctgatggtcggcgctggagatattgaccgcctggtgccccaggtagcagatgagatccgccgcaggctatgaagaatagagccttcgtacgcaacctactcctgctcctcctgtcagtcgcactgataggaggtatcgcgtacttactcatccgctccccacgcgtcacctccaccgaccgctgcgaagctgtcaccgtcgaggtaaagaccgaggcgggtggcgaaccgctcttcctcaccggtgaccgcatcaccgatgagcttgcccgccgtggcatccagctacgagggaagcgccttgactccatcgacctccgtaagatcgagcgtacgctgctcagtatgcctatctacaagcgtgctgaggccttcatcgccccctcatcctcctccgtgcagatccgtctgacggagaagcaccccctctacatcgtgcaggaagcctcgggtaagagctactacgtcacgcagggtaagggtaccatcacggtgaaccccaccttcgcagcttacctccccatcgtcagcggtgctgtagacctcaagatggctacgggtcccgtctacgacctcatggccgccctgcgcgaagacccttacttcaccgactacttcgggcaggtctacgtcgacgagaccgatggtatcgtgctcatcccacgtatcggcacgacgcgagtcattatgggccgcgagtctaactggagtgagaagctccgtaagtggcgcatcttcgctgagagcgtactccccaagcgcgggatgaatgccttcagctacgtcaacctcgactacggcacgcagatcatcgcccgtagccgctatgcccccgagggcgagaccttcgacgaagaaggtgaagtcgtcgctgcaccagctcctacacccgatcccgcccccaagcctgcgccagcagtctctgcggctcccgctccgaagaagcctgccgccacggagaagccccgcgagaaggctaaggaagcccctaaggacaagcccaaggataagcctgcaagcaagccgggcgacaaggcgaagaccgataagaaagagccgaagaaggaccccaagaaggatactaagaagcccgctcctcagcaagcccccacccccaagaaacccaataagcccgccgagaagggcaaacctaacaagccacagaagaaatgaacgatcgtagggatagcatatacgccgtcatcaacataggcagcacctccctctctgggatgctcgccacgaagtccccacagggacgcgtcgtgcccatcgccgcccaccgtgtccccacggctggctgcgtgcgccaaggctctatacacaacatcgaggaggctgccaagcgtatctttttgctcctcgataagctcagcaccgccctacccgaggaggctcagatctccggcgtgtatgtagggctggagtgccgctccatgcgctccgagcgctatgactccttcatcgacctcggtgaagaaggtagcgtcgtcacccccgagcacctacttaccctcaaggaccaggtcagtgatgccagctatcccggcatgacgatcctctccatcaccgagccccgctaccgctgcgatggcaagcgtgagtccaaccccagaggtgtgcgttgtcgccgtctggaggcccagtatctgctcatcgtagcccgccagaacatcatcatcaacgtccgcgagaccatcgaagatcgcttaggtctgcgccttttgggcatcctccccacgcctatcgctgaggctgctgctacgatgacgatcgaggagatggccctcggctgtgcctacgtcaacatcggcggtggtaccacctccatcgcgatctatcaggagcgcttccccgtcgctctctacgtcctgccgctgggtgggaacaatgtgacgcgcgacctcacgcagctctccgtacccctcctcgaggccgacgctgagaagctgaagatcgagcgaggctcgatgaacctctccgtatctcgcacccaagagatcgaggctaagtcggctgatggtagtaccaccaagcacttcagccagctcgaggtgaaccgctacatcagcgcacgtatcctcgagatcctgagcaacgtagtgagcatcatccacgaagcaggctgcagcgagagtatccctaagggcttcgtcttcgctggtggcgtgacgaagaccgaccacttcttcgagacgctgcgcaagctctctcccgagtaccgcgaagtctccctacgccgagatatctatgaggatggtgttcagaaagaactcctctctgactatatcaccgagatcgctctcgcagctcaggccagcgagccgggcgtaagctacgagctccgccctcttgagtccctcctgcaggagcagcccgaggcgcgtagcagcgagcctactgaacccatagaagagcccaaggaggccgaggaagagtcctacacctacacgactatcagcgaagctcagcgcgtccctctcgacgatgatgaagatgattacttcgactacagcgaagaggaggaggacgaagaggaggaggacaccaagcgcgagacgaagcgtgagcgcaaggagaagaagtcgtggagcctcaattccttcataaacagcatcaacgggctcttcggcgcgaatgatggtggtgatgatttttagcccatacctttagataagatagatacaatggaacgaggtaacattgaattcgaatactctgagagtgagatcaagcagctcatcaaggtcgtgggcgtaggaggtggtggcggtaatgccgtcacgaagatgttcaccagtggctctgtccctggcgtgtccttcctcctatgtaataccgataagcaggcacttgaccatagccccgtagaggataagattatgatcggccctacggtcactaagggtctcggtgctggagctaagcctcagcgcgccaaagatgcagccgaagagagtggggagcagatccgtattgctctcaccgctggagagacgcgtatggtcttcatcaccgctggtatgggtggtggtacgggtacgggtgcagcccccgtcatcggcaagatcgccatgaaggcgggcctgctgaccatcggtatcgtcacgatccccttcctctttgaggggacggcgaagatcctccaagccctcgaaggggtcaagcagatgcgcgagagtgtagatgctctcctcgtcatcaataaccagcgcctcatcgaggtgtacaagaacttcaccgtatccgaagccttcgccaaggccgacgatacgctgagtaatgctgctcgtggtatctccgagctggtgaatatcgcaggggaagtgaacctcgactttgccgacgtcgataccgtcctgcgtggtggtggtgtggccgtcatcaataccggctatgctgaaggcgaagatcgtatgactctggctatccaagaggcgctgaactcccccctcttgaataacaacaacatcagcaaggcccgccagctcctcatcaacgtctactatgatgataaagctccgctgacggtcgacgaatttagtcagatccacgagttcaccagcgagttctctgacgaggtgaataccatccatggtatctctcgcaaggaggggcttggcaccaagctcggtgtcaccatccttgcctcgggctttggcttcgacgaagatatcttcatccccaagaccgtaaagaagcgcgatccgctcactaagatcaacgaagataaggagcgcgacgagcagcaccgtctcatcgagcgtatctacggggagcatgctaccaagcgcacgaaggccgagcccgtagctctaagcatcgacgagcttgatgacgaagagctcctcctcatcctcgaggagacgccttccttccgccgtgatcaccgcatcttcgagagcaagcgcatcgataagaccaacaacagagcgatccgtatcaacaactatggtacggccagccagagcgctcgtgagcgtagcacgctgtcggccttcgacctgcatacgccccgccccgagccttcgcagtacacgacgagctcgacgaccttcaccacctctacgccatcacgtccagagcccgtagaggaggccactcagcccgaagaagagaagaccgaggagacgcctgagaacgtcatccgcttctctggattctaaaactctatcctatactcccccactctactgatgattatagctgttgacttcgacggcacgatcgtgcgtcaccgttatcccaagatcggcgaggaaatccccttcgccacccagaccctcgcgatgctgatacgtgatgggcatcgtctcatcctctggaccgtccgtgagggcgctctgctggacgaagccgtcgagtggtgccgccagcgtggcgtggagttctacgctatcaatagggacttccccgaggaagacgctacgggatcgggcttctcgcgcaagctcaaggccgatctcttcctcgatgaccgcagcttcggtggtctgcccgactggggcacgatctaccaccgcatccaggccggtaaggctctcgatggcgagtggcaccgactgggtctctacgaagaggaggaggagaagcgtggcttcttcgcgcgtctcttctcgcgtgactaagccgcaccgcactacactatacacattagccatagatctatcatgtatctacgccctcttttcacccttgccgctgcgctatcgctcctcacagcgtgcagtggggactcctcaggcactaagacgagccaagaggacgcacctcccgtacagactacggatacgacactcgtcgggaagcgcctacacctgcgcttccctgagaacgtctctaccgtcgagtacctatcacacaagcacctcttctggaggagtaaggactccgtccacggtagcaaggaaggcgaagacaactacagcgccgtacgtatcggcacgagtgtttttttcgtcaactgggtcgaggccgatggcacgaccgtgagccaggtccttgacctcgacgagcgtacctgtaaggcattcatcacctcgaatgtctactcgcacaaccaagcttcgcgtagcacctccgtcctctctggcaccatcgagaagatcgaggatgccaatcacctgctcttagactaattccccacgggggcctttgctgtccaaggcctatgtccagcccctaccgcatcgacgagcgaagcatcacagagcaccttctggagcttgctcagcggggcaatcagccctttacccagcggctacatcccgatatagcaggcgtactcggtgtatgtctgcccgatctacgtgcgctcgctcgccgcatcgtacgcagtgggagctggcctgcttaccttgcggaagctgagcgtggcgagcgccccagagaggaggactttatggaggcacgtaccctgcagggcctcgtcctcggtatgctccctgtgaatgacttctccgactacctcacccacctctcgcactgggtgcgggtcatccactcgtggtcggtctgtgactccttcagcctcccccagccgaagaagctcctccgtgagcatagccccgagctctgggcgttcttcgtcccctacctccagcatagcggggagtatgaggtgcgcttcggcatcgtcgccctcatgcagtacttcatcgacgatgagcatatagacgagctactccgccactacctcgccgtgagccacgagggctactacgtgcgtatggcgctggcgtgggctatagctgagtgctacaccttctaccccaccgagacccacccttacctcgctgagaagcgcttcgagccgtgggtgcacaacaaggctatccagaagatctgcgagtcgcgccgcatcgatcccgacaccaagaccctactcaaggctctgcgcataaagacctcgaaatagcccccttcagcgaaggcgtagagattcctacgattctctatctttggagtagcaatactcactacctaactccgacgaacctatgaatagtaagctccttatagggggacttgctctcttccttcttctccccaacttgggctgtgagaagagcgcagagaaagccctgcctacctcacaaagagaagcaaagagaggacatctatccagcttggagaacttctccgaaagcgagctcagcgctttcaccgccacgtatgaccccaccgatcctaagagcaaagagaaggccatcggcacactggataaagctgtgaagctattcgtctcccctaagatcaatacgaagctgagcgagtcggcccaatgcgtcatcgattcggacgacaccactgggcgcgcatgggtcagctccctctctatcagtcgcccgcgtgagatccccttctacgagcaatttatgctcatctgcaatgcccacccatccccgaatggacaggaaggtatgtgggacctcttcaccaaagaaggcgagatcagcatcctgtactaatagcgcattcccctaccttgtgcgggacgctttcggctaagccgagggcgtcccgcacggcttttatagatcccttcactacggcgatgatgtggcggactatacagcctttttcctttccgcatagaagaactaacgccctacccgcagtgctataagtcccctcctatacagcatatcctctatccaggtacgtagatttatagactctgcacgtagatcctatcatccacctacgtagtcctaagatccacgtaccgagataaagctttagccgtagtcctaagagacttttccaccacgcgtgcgggagttttcctgcagtgctcacagagacaccttgtagaaactgaaaggatatatctatatttggtatcgaaacgaactcacaaacctaaaacacattcaggtataaagactcttatgaaagcatctaagctcctttgggcagtagttatggcgctcaccttcgtactcacgtcttgtgaccgagtcacggatgagcccactattgagggtaaaatgaataagttcttcgatagccaagcccagcaaaagtccttccgtgtgttgacggcctcaggaaagccgtacaaccataaaatagattggcatatcatcggtatactagatccaaagtctgagacctacttaacgaagaagatcgacaccctatcgaatggagacctcaagatatcttacgactgggtagcctttatcgtcagagagaacaagtccgtgatcgatgtcgaagtccagaagaatgaaacgggacaggataggtcagttgacttcgttgcccaggataaccacaagggtctcgcctccccaagtatgacggtcatccagcgagcaaaataagctccatcctatcatactcagggtactcaccctactccgtgcgggatgctttcggctaagccaagggcatcccgcacgagtgtttatctagggcgtatggtagggctacttcggtactcagaagaaggctaattaggtagctggaggacctccagcttattgatgaggtgctgacttctacacggacgagagtcacccgcccgaagtgcggtcagcgagcgggcctttcggagccgatccgtagcgtacgtaagtagaggagaatgtgtaactttgtggactgtgcgcgcctcgtgtcggtgcgtcgcagctatcacatcgatacaatccaaatagataatagaataagcaactgctctcatggcacagcaagaagacctctttaagaaggtgatcgcccactgtaaggaatacggcttcgtcttcccctcctccgaaatctacgacggcctcggtgctgtctacgactacggacagctcggtagcgaactgaagaacaacatcaagcgctactggtgggaggcgatgaccctcttggctcctaacgtcgtagggatcgactcagcgatcttcatgcacccaaagatctggaaggcctctggccacgtcgacgccttcaatgaccccctcatcgacaacaaggactcgaagaagcgctaccgcgctgacgtcctcatcgaggatcagctggccaagatcgaggagaagatcaataaggaggtagccaaggctgcgaagaagttcggcgagagcttcgacgaagcacagttccgctctaccaacggccgtgtactcgagtatcaggctaagtgggaagagctgcacagccgcttcgctgctgctatgaacgataccaacctcgaggagctgcgtcagatcatcctcgactacgagatcgtctgccccatcagtggcacgcgcaactggacggaggtccgtcagttcaacctcatgttcgccaccgagatgggctccacagccgacggtgcgatgaaggtctacctgcgccccgagacggctcaggggatcttcgtgaacttcctcaatgtgcagaagacgggccgtatgaaggtgcccttcggtatcgcacagatcggtaaggccttccgcaatgagatcgttgcccgtcagttcatcttccgcatgcgcgagttcgagcagatggagatgcagttcttcgtccgccctggtgaggagctcaagtggttcgacttctggaaggacctgcgtcttcgctggcacaaggccctcggcctcggcgacaaaaagtaccgctaccacgaccacgagaagctggcgcactacgccaacgctgctacggatatcgagtttgagatgcccttcggcttcaaggaagtagagggtatccacagccgtacggacttcgacctgaagcgtcacgaggagttcagcggcaagaagatgcagtacttcgatcccgagctgggtgagagctatgtgccctacgtcatcgagacctctatcggtgtcgaccgtatgttcctcagcctcatctgtggctcctacgaagaggaagctctcgagggtggtgacaagcgtacagtccttcgcctgcccgcagctctcgctcctgtcaagctcgctatcctgcctctggtgcgtaaggacggcctcgatgccaaggcacaggagatctacgacgagctgaagttcgacttcaactgccagctcgatgagaaggactctatcggtaagcgctaccgccgtcaggacgctatcggtacgccctactgcgtcaccatcgaccaccagacgatggaggataacaccgtcaccctgcgtcaccgcgacacgatgcagcaggagcgcgtcgccatcagcgagctctcccgcgtactctacgaggctacttcgctgaagagcctgctgcgaaagatctaacccccacccaagagagctgcccaccacttcatctaagagacaatgatgataagcaagatcaccacaggcctcgccctgcttacgctcctcagcctcacgagctgcaatagcactatcgacgtcgcccaggagcgccgtgccacgaatgagcgggccttccgcgccttcgccgacagcacggacttccagcgcgtcaccgtacccggtatcacgggtagtggcttcatctatatgaaggtcaccaaggcaggcgatgcgtctgtcggggtggactataccgatgccgtcacgctcttccgtgacgcctactcgacgagcgactggatcaaggacaacctcaaggctatgcgtgtgcgccagacccttgacctcaactccgtccagcaggagaccgtcgccagcctccccgtaggcctgcagatcgctgtgcagaacctccatcagggagcggaagcctctatcgtagtgccctggtacctcaataccaacaatatgctggagcgtaccgagagctatacctcactatactaccgtgtccgcctcgggagcgtcatcaagccctccacgaactaaggatcctataccctatagatgcatatactcctcagcaatgacgacggcttccgcgccgcaggtatccaagagctcgctcaggcgatgctcgccttcggtcaggtgactatcgtcgctccagatgggccccgctcgggcttctctggtgctatcaccacgacccaacccctacgcctcaagcaccgcaccaccgaaggtaacctcgctgtatatagctgcgagggtacacctgtggactgcgtcaagctcgcactgaacaccctcttcgtagaccagcgccccgatctcatcatctcgggcatcaaccacgggagcaacgagggcatctgcgtgagctactccggcacgctcggtgctgcccgcgaaggctgtatctacggcatcccatcgctggccgtgtcgctcgatgacaccgcttggcaccccgacttctccgacagcatcgactataccatacgtgtggtgaagatgatgcttgagaagcccctaccctggcagacgatgctctcgctgaacgtccccaagacgaagcccaagggtctgaaggtatgccccatgactgtaggacgcttcgtcgaggagttcgtccactctgaggacggcaagggcaagcgtatccactggctcacgggtcgccaagatcccgccgaggataccaaggaagccgactggcactacctcaaggatggctgggcgacgctcacgcccctccagctcgactgcacgaactatcagtggctcgaggaactcgaagccctggccgaacgctcagcatagcactatgcgctacttcttagtcgcaggcgaagcctctggcgacctccacgcctcggcgctcatacgggcgctgcgggctgaggatccagaggcttcgtttgcttttatgggtggagacaagatggaggccgcaacaggcgtcgcccccatcgtccactaccgtgaggtcgccttcatgggcatcgtcagcgtcgtcaagaacctcgggaagctcacccgcatcggccgacagatacaggctgccatgcgtgacttcgcccccgatgtggtcatccctgtggactacgcagacttcaacttccgcttcatcctcccctacgccaagaaggagctacgctgccccatcatctactatatcctccccaagctctgggcgtggagagcagggcgcatacgccagctccgccgctatgtagatctcgggctgagtatcctgcccttcgagaccagctacttcagcgaccgcggcctccgcacagcgtatataggtaacccttgcgtcgatgctaagctcacctacctcgctgagcatcccgagcccgtagagcgtgagcagatgctcctcctcgtaccggggagccgtcagtctgagctgcgggacaacctcccagagatgctcgcagctaccgctgcctattctcagttgggctggcgtgtcgtcatcgctggtgctccaggtctcaccgctgcagactacgccccccacctcggtaagtacagcgatacccccatcctcttcggagatacctacggactcatgcgccgtgcccatgctgccctcgtcacctcgggtacagcgacgctggaggcaggcttatggggcatccctatggtcgtctgctatcgtatgggcggtaagcgcatcgctcgcctcgtcttcgagcgcctcttccgtgtgccttacttctcgctggtcaacctcattctggacaggcctgccgtccccgagctcctcgccgaccgcgctcactccgtgcagattctctcaatcctctcccacctcatccccgaggaggatcaccgccgcacggaccagctgcaggcattcgcccagctgcaggagctgatgggcaccgagcccagcgccccacgcgccgcaagagctatcctgagctacctccacgaagcgcgataagcaccctactccaccccctcagtgagctggggaaaacaagtgggtaagcgtgggataaataggagactcatccccacccctccagcgacgaccttactcccctctccccccttccctcggggtgtagataactcacgagattatcccactccaatacacataccgaaagaggcgagagcgagcagcgcaatcccccgagatgtggatgccttcccctcgactgcacccaaagcccagctataagcggaaagtcacttgtgaataccctgtgggcaggaagcgcaaagcattaggataagtccgtggaggagccgagtggaggaagtgaagccgtgaggggattacccacgattccaccgactataataacaataggagatagaaagaaaaaatttattcttcctctatatacttcacttatattaagcactggggataagtcgagccgtcgggagcgggaggcctgaatgtaaggtatgccactaccctatgctggtgtcttatggtaccaacttgtgggactccacgcggggaatgcgtggggggcggagccaactgatcggtgaaaaaaactatctttgttcaataacaagaatatctcacatcatagtacacaagcacagctaatggaaaagccctatgtaataggtgtagacctcggtgggacgaacaccgtctttggtgtcgtcgacgcccgtggtaatgtcgtcgtcaatgcctcgatcaagactggtacgcacaacgatattgagctctacctgaatgacctcgtcacaggactcaacatgctcatcgagcaggtcggtggcaaggacaagattcgtggtatcggtgtaggtgcgcctaacggtaactacttcaacggctctatcgagttcgcacccaacctcccttggaagggtaagatccccttggctcagatgatccaggatcgcatcggtatccccgtggcactcaccaacgacgctaacgctgccgctatcggtgagatgacctatggtgctgcacgcggtatgaaggacttcatcgtcatcaccctcggtacgggcgtcggtagtggtatcgtcgtcggcggtcagctcgtctacgggcacgatggcttcgctggcgaactcgggcacatgatcgtccgtcgcaatggtcgtatgtgcggctgtggccgtcagggctgtctcgagacctacacgtcggctacgggtgtagcacgtacggctcgcgaatacctcactatccgctccgacgagagctcgctccgtgatctggatatcgacacgatcacgagtaaggacgtctttgacgcggcttcggctggcgaccgtctcgcgctcgagatcttcgaatctacgggggctatcctcggcgaagcctgcgcggacttcgtcaccttctcctctcccgaagcgatcatcttcttcggtggtctcaccaaggctggtgacctcctgatgaaccccatccgtcaccacatggagaagaacatcctcaagatctacgaaggcaagaccaagctcctcgtctctcagctcaaggagagcgacgctgccgtcctcggtgccagcgctctcggctgggaagccaaggaaatctaatctccttcgatccctatgatgacagacgagccggtgcactgccgcgctcgtctgttgtctttccccccacacgccttccccatcccttatcccctatgcacacacatccactatcgagcttcagctactgcccccgctgcgggcagaaggggctggagcatgtacacggccgtgccatccactgcccgagctgtgacctcacttacttccacaatgtcgcctcggctgtcgcttgcttcgtcctcgacgaggcggggcgtatcctcgctgtacgccgtgcacgtgatcccgagaagggcacgctggacctcccaggtggcttcgtagaccccgaggagacggtggatgatgctgtgcgtcgtgagctacgcgaagagacgggtctcgaggcaacggaggtacgtctactcttctcgatccccaatgtctacccctattcgggtgtcgatgtctatacggcggatctcttctacctgacgcgtgtgaagagcttcgacggggcgacggctatggatgatgctggtgagctggtcatcgtcgacccagcagacctccgtcccgaggcctttggtctgcgctcgatacgtgccggtatagagcgtatcgtagctgatcctaagctcatcggataacgtacctatttgtcctatgctcggtagcctttggagtcggctgaagggctttgcaccgctcttcttcatcgcgatggggctcttatcgtggcgtatcaccgcgccctatggttggctggcgccgtggatcatctcagcgatgctcttcttcgctgtgctcaatatgccacccagcgctgccgctccacgaccgaagcatctcctacttttcgtcctccagctcgctatcggggggacgctctacttcattctctcggcgtgggatcacgtcatcgctacgagtctcttcatgtgcttcctcgcaccagctgctgcagctgcgggagcgatgacgagtctcatggatggtgatacaggcttcgctacgggctacaccatcgtcacacacgggctgatctgcctggtagcacccttcctactccccctacttgattcgcacagccatctgcccttctggacgctctcagggcagatagcgctcctggtgatccgtatggtcatgctacctatcgtgctggcatggctcgtgcgcggtgtgatgaagagtatggggaagacccctcacccaccgaagaaactcacctacctcttgtggctctcctcgctgctcttcatcttggggaagagcgtctccttcgtcttgaaggaaggctcggagcaggtcgggctactcatcgcctccttcgctgtcgggctcttggcgtgcgctattcagttcacgctcggcagtcatctggcgcgccgtatcggcgtcgaggaggtcgcatgccgtcagtctatggggcagaagaacaccgccctgacgctctggctatgcatcaccttcatgcatccgctcgtcgctcctggtatagcgggctatatcgcttggcagaacttcttcctcacctactatatgaatcgccgaagccgtctcaaaggctgaggcctcataccactacgcactactatctctaccactatgaaacgcttccttctctccctccttcttctcctccccttcgtcgtgagcgcccagagcctccgtggggattggtcgggtaagctctcactccctatgggcaagctccgtatcgtcatccacctctccgaagaggcggggcgctggtcggctaccctggatagcccagaccaaggtgcctacgctctacgtgccgatgaggtgcatgtctcgggcgatagcctgcgtatagagcttcgtagtctacgcctgacctatactgccgtgcgcacggcggatgacaagctctcgggcaacttccagcagggaggtatgagtctcccgctggatatggagcgctcgaccgagaagcaagacgctccccaagcgcctgcctcctatacggaggaggagctaagcatccccgtctcgggctcgtctgtcattctatcgggtagccttgccctacctaagacggggcaggcaccttatcctacgctcgtcctgatcacgggcagtggtccgcaggatcgtgatgagacgatcttcggctgtaagcctttcttggatatcacccgccgacttaccgaagcgggcttcgctgtcttccgctatgatgaccgtggagtggggaagagcacaggtgtcttcctcgcctcgagtatcacggactttgtgcacgatgctgaggctgtcgtcgctgccctcaaggggaataagagcgtccaggcgcagcgtatcttcctcgtcgggcatagcgaagggggctatatcgctgcgaaggtcgctggtcaagaccgctcgatagctggggtcgtgtccttagcgggccctgccttcgcgatggatcgcatccttctggatcagatggatgccctcaatatcctcgcggggaagagcgagagcgagcgtgcgacgctcagcaaagccaaccgcgagatctatcgcctgatgcaggataagcgcctctcgctggacgaggtgaaggcacgtgcggcaaaggtgatcgatccactcctccccgtctttagccccgacaagagtacccacgaggcgatccgcacgcagatcatgagccagctcacaccttacctccgacagctcctcagtctggatgtcgcagggacgtggcgtgctgtcaagtgccccgtcatcgggctcttcggcgagatggacaagcaggtcttacccaccaatgcggccgagctactgcgtctccagcccaaggctcaggtgcaggtcttccctaagctcaatcatctcttcctgccttcgtctacgggttcgcctatggaatatcctacgctgagagggcacttctcttccgatgcgcttgacttcttagtgcgttcgctgactgctttgaagtagtcttcttctacacaagacaaatcataggcgggctgagcgcctcacatctcctgcgcgggatgtggggtgctcagcccgctttgtatccgtacctttctacgagatagagtgggggagtatagcccctctcaggagtgaatataggatgggggtggtatgaacctatattggtcgacgggctgacctatataggtcgtgacgcgaaccaatataggtcgtcgcagtgacctatatagcttcactcagcgaccaatataggtttgcaaaagcagggtcgtatggatgcgtgggatgcacctcgggaaggacttcactatgcttcatctgggggcaagattgtgaattattagctatcttcgcaaactaatataggaccacattatagatcatagttattagacgatgcaaacagtagtcagcgggatccgtcccacaggtaatcttcacttaggtaactacttcggtgctgtacgtgccttcacgcagatgcagaatgagtataactgctatttcttcatcgctgactggcattcgctgacgacccatccgcatcccgatgatatcatccgtagtacgaataccatcctcgccgaatacctggcgtgtggtatcgaccccgagaaggctacgatctatgtgcagagcgacgtgcgtgaggtgctggagctctatctctacctcaatatgaacgcttacctcggtgagctggagcgtacgacctcctttaaggacaaggcacgccagcagcccgacaacgtcaacgctggtctgctcacttacccctcccttatggctgctgacatcctcatgcacaaggccgtcaaggtacccgtcggtaaggatcaggagcagaatatggagatggcgcgtaagttcgcccgccgcttcaataccatctacggcgtggacttcttcaccgagccccagtccttctccctcggagagcgtgcactgaaggtccctggcctcgacggctcagggaagatgggtaagagcgaaggcaatgcgatctacctcatcgacgacgagaagaccatcagcaagaaggtcatgcgtgccgtcacggacgctggtcctacggagcctaacagcgagaagcccgagcctatccagaacctcttcacgctgatggagatcgtctccgcgcctgaggtctaccagcacttcgatgagctctacaacgactgcgctatccgctacggcgatatgaagaagcagctcgctgccgatatcaacgccttctgcgcacctatccgtgagcgcatccttgatatccagggcgacaaggagctcctctcccgtgtggctcgcatcggtgctgagaaggctcgtgagtccgcctcgaagacgatcgatgaggtccgtcacatcatcggcttccgcccccgctaagcaaaatcattcaatttagataagatactccccatggaattaatcggtaaaatcgtccaggtactccccttacagagcggtaccagtaaggcaggtaactcttggcagaagcaagaatatatcctcgaaaccctcggcacgcagtacccccgcaaggtgtgctttaatctcttcggggataatgtgaacaagtttcccctgcaggtaggacaagaagtgacggtatctatcgacattgagagccgcgaatttaatggtcgttggtacacagatgtccgcgcttggaacatagtccagggtatccagctccccggtgtagctgctcccgctcctgctgcttatagcgcacctcagcctcccgctgctcccgcagcggcacctgccgcagctcctgctgcccagcctgtagctcccgctggtgctgcagatgatctgcccttctaagctactggtggtagactaccgcctgtagacgccagacccattagacgatcccgtcgagccctgtgcccaagagtgaagtctaatgggtctggtggatatagacacttacccctcgccttcaccccgctacttcatagccgatgcacctccttctcctcgctgtgggcaagaccgatagccgtgcgatcgaagagctgacgaagctctacgctgatcgcctcggccattacctgcccttcaccctgcagatcatccccgatatccgccgctccagcaagctcacccccgagctacagaagcagatggagggcgcggagatcctgcgccagaccagtacgtcggatagggtagtgctcttcgatgagcgcgggcgagagttctcgagtaccgccttcgcctcgtatatcgagcgggtgatggtatcgggtgtgcgccgtctggtcttcgtcataggaggcccctacggcttctcggaggaggtctataatcgggcagatgaccgcgtgtcgctgagtcagatgaccttctctcatcagatggtacgtctcttcgctgtggagcagctctaccgtgcgcagacgatcttgagaggcgagccttatcaccacgagtagggtagtgcctatgtcttatctctacacatatcactaagattttatttctctctatatgcgtatatgggatcggctccaggcttgggtaagccgtgctgaccagcgatgctactactggatactgacgctggcgcttctcctgcccaatgtcgtgctctccgtcgtcatgcagcagcccgccgtagggcgtgtgctgaatatcctgctgatgctaccggtgtatatgcttctcctgctctcggctaagcgtcctgggcgtgtctactgggggctcttcgtcctggtcttgctccatgccttccagctcgtactcctcacgatattcagtggctccgtcgtcgcggtggatatgctcctgaatatcttcacctcggagcctgatgaagcgggcgaactcctctccaacatcctctggcccatcctcgccagcgggggcttctacgccctgacctttgtcgtggcgacgctctcagcgcgtagccgtgagagcctcgcaccccgcttccgtcgccgtatggccctcgtctctgcgcttatccttctcgtcgccctacctatatatataggggcgaagaagcgcttcccctacgtgcatctgcgtgccgaggtctatccgatgagcgtcttccataatatgtatctggcgacgacgaagctctatgaggtgctgcactacgaccgcaccagccaggacttctgctacaaggctacctccgagcgtgccaaggatgagcgtgagatctacgtcctcatcctcggtgagacgtcgcgtgcacacagctggagcctctacggctatccccgtgagacgaccccacacatcgattcgctccaccgtgatggtgggcttatcgccttcgctgacgtcctgacgcagtcgaatacgacgtataagagtatccccatcatcctctcgcctgccgatgcgtcttcggcggagaatctgccccgtgtgcaggggatcctctcggccttccgtgaagcgggcttctatacggccttcatctccaaccagccagggaaccacagctatgtggacttcttcgctatgcagggggacgagcatcaccccatccgcaaggagcttcgccgtgagaagcgccgtctctacgatagcgatatgatcccctatctgcagcgccttatggcgagcgagcacccaaagctcttcgtcgtgctacacacctacggcagtcacttcagctatcgtgaccgctatccgaaggaggataccttcttccctgtgaaggggcactactcgggatcggaggccgacagccttgtcctgcgcaatgcctatgacaatgccgtgcgccagacggataagttcgtcgactccgtcgtccgcgtcctcgagggtggcgatcgtgctgcttcgatggtctatatctccgaccacggggaggacgtctatgatgatgatcgtgagcgcttcctccactcctcgcccgacgtctcctactaccagctccacgtaccactcctcatctggggcgacaagcgctggcgagatgcccacccacagctcttcgctcaggggcgctccaatagccgtgaggccgtctcgtcgaactccgtcttccacacgctcctcgagctggcaggcatccgcacatcctatcgccgtgatgacctctcggtcgtcagctcgcgcttcaagggcggtgtgcgcttctacctcaatgaccgctacgagtgcgtgcccatcgaggcactcgagttgcccgaggaggatatccgcctcttccgtgcgaagggactgcacttaggtcccctgccgaacgagtagccccacacgctacatatattactccccctaaggtaggtgcgctccgctgcaccacctcagggggagcctctatatatgggggtaaagcgaccagtactacttcgtcatctgaccagtactggtcactattacgaaccagtactgcttcgcacggtgaccagtactgcttccgtcagcgaccagtagtggttacttttttatctccgtggagcggggtagcgtagctggtactaagacatagcttctcgggggagaagtgcggggcgagcgtgccaccttcatcgcgcgctttgggtaggatagtggtcgatctatcgaaggtgtaagccaccgagctataaggagttggatatcttccttagggattagataattgtattcatttgtaaagtttttagttataggcgattacgccattgctttgctaaaagaatatctatctttatagaccttttatcactaacacgatataagcctatgaaacgaatgaagacagtctgcagcgtgctccttgtgggtctttcgctgccaggactcgccttagaaaatgcctatgccacgccggtagagaccgccatgacacagactcaggatcgtaaggtcgccttcacagggaccgtacaagactccaagggcgaggcaatcgtcggtgctactatcctggtcaaaggccaggctaagggcaaggggacactgaccgaccccaagggacactttaccctaagcggactcaaggtagggtccgaactcgtcatctcctgtgtagggtataagacccagaccgtacgctggacgggcacacccctctccatcacgctcgaggatgagatgacccagcttagtggtgtcgtcgtcaccgcactcggtatccgccgtgaaaagaaagccctcggctacgccatgcaggaggtcaagggtgaccagctcatggctgtacgcgagcctaacatcaccaacgcactctcgggtaaggtatctggtatccagatcatcaagggctccagcagccccggctcctcctcgaagatcgtgctgcgtggtaatagctcgctctcgggcagcaaccagcccctcatcgtcgtcgacggtgtgcctatggacaacacgacaggtgctacgaacaatgacttctggaatcccgcagccgatatgggtaacggtctctccgatatcaatgccgaagatatcgagagcatgaccgtgctgaagggtgcttcggcagctgccctctacggctcgcgcgctggtaacggggtcattcagatcatcaccaagagtggtcgtaagaacaacggcctcggtgtcacgatctcttcctcagtaggtgtagagcgcctcttcatggtacccagactgcagagccagttcggtcaaggtactgacggcgcctataagaacgacgtctcctccagctggggtcctcgcatcgaagggcaggagtacacgaagtgggacggcacgaagaccaccatgcaggcctacgacaacgtagctagctacttcaagtctcctgggatcgacctgacggagaacatcgccttctctcagatgtacgaccgcacgtccatctactcctctctgacacgtaccgacaataagagccacatccctggcgcttcgctcggccgtacgaatatgacgctgcgcgccacgacgaagttcggccccagcgaccgctggagcactgatacgaaggtccagtacatccgctccttcgtgcagaaccgtccgctcaatggtgctaatgcctccaatgccttctataccatgtactcactgccccgcagtatggacatccgcgacttcgaggaagcccgtacgcctcagggtgctatgcgctggtatggtgtaggtaatcagacgaacccctactgggcaagcaagtacaacctcaacaacgatacgcgtgaccgcttcctcatcagtgcagcgctgaagtacaagatcaccgactggctcaatgctgagctgcgtgtgggctctgaccagtactctacgcgcatcgagcgtaagacctacgctggctcgcctatcgcaggtggtgggggtaagtatgagacggagcagatcaagttctatgagaacaactacagcttcctcgtctcggcacagcgtgacaacgtcttcggtaagcttggcctctcgggctccgtcggggggaacctcatggagcgcaagcacaatggccttcgtgccagcgtcagccagctcatcgtgcctaacctcttctcgctgaccaacggtaccgacaagcccgacaactccgagtcctacagccacaagaagatcaactcactctacggtacggcacagctgaactgggacgggtacttcttcctcgacggtacgctgcgtaatgactggtcgtcttcgctggcgaaggctaaccgctccttcctctatccttctatcagcacgtcgctggtcatcaccgacatgctccgtaagatggatgtgaatgctccctcatggctctccttcgctaaggtacgtgcctcggctgctcaggtgggtaatgacctcgagccttaccagctctacagcgcttaccgcatcgagaaggaccccctcggcggtacgatggccaacatcgataacgtcctctacaacgataaggtccgcagtgagctcatcaagtcctacgagctgggtctggagatgcgcttcttcgatagccgcttcggtgtagacttcgcttggtatcgcaccaacgctaccaaccagctcatccgcctcggtatggaccctgccagcggctacgatgctaagatgatcaacgcaggtaacatccagaacgaaggtattgagttcatggtcaccgctgacatcatccgcagcgaagggctgaagtggaatgctcagctgaacctctcgcacaacgagaaccgcatcatcaagctctacgatggcggtggtatcgagtctcccgtgacggagtacaacctcggtacgtacgacaacctgaagatcctcgctcgcgaaggcggtaagtacggtgagatctggggctcaagctacaagcgcgtcgaggacaagacgagcgacctctatggtaagatcatcaccgacgagaacggtctgcccatcgcaggcgatgagaagaagctcggtgaccagcagcctgacctcctggctggtcttacgaacagcttctccttcgctggcttcgacctgagcttcctcatcgatgctcgctttggcggtaagatgttctctggtacgaaccacgccctacaggctggtggtgccgctgctgctaccgtcgtcaacggtgctcgcgataagttcgtcgtcgacggcgccgtcgagagcgaagtcgctggtaagacggtctacacgaagaacaccgtcgaagtcacgcctcaggactactggggtgctatcgtcggtcgtagcgggaacctcggtatcaacgaggcgaacatctacgacgctacgagcgtacgtctgcgtaacatcgccctcagctatacgctccccaagagcctgctgaagaatacgcctatcacgaaggctaagctcggtatctcctgcaacaatgtatggatgatcaagagctatatgaacggcatcgaccctgagtcggtcttcgctacgggctccaacgctacggggtatgagttcgcctcttctcccacgacccgctccttcctcttcaatatcaccctcggcttctagtcgctaagccatgtatatcatgaacaagaagaatattctcctctggggtctgtgcctgtgcgctacgatgggtatcgcctcgtgccgcgacttcgacgaagtcaataccaaccccactgccgcttcgcaggatcaggtgctccccgagtacctcatcaaccgcgcgatcatagctgcccagcagaatccccacgtcgcggagcgtgccttcgtcctctactggaagacgggcggccaccagcaccgtggtggcggtcttgccgtaggtggcttcagtgacggctggagctccgactactatagccgtatggctgaggaatgcctcaagcccctcaccgatgctatcgctatgtgcgagaagcgtatcaaggacggtacagcacgcacctatgataagagcctccagcaggtagctcgtatctggcgcgtctatatgctctccgagctctgtgacaacttcggtgtcgtctccatcgacggctatcagggtggcaaccccacctacgtaggtgctaaggaggcttatgcctatatgctcaccgagctgaaggaggccgctgacatcctcgctaccgctcctggctcggacaacggcgagacgaacaagctcgaccgtgcctatggctacaacactgctaagtggcgtgcgtatgccaactcgatgcgtatgcgcctctcgatgcgcctctctgaggtcgaccctacgacggctaagacgcacttcgaggaagctgctgctgcagggggtatcacctcggcaagcgaccgcttcgaggtccaggagaaggacggctgggatgacctgacaggcgtcatgagccgtcagtggaatcaccagatcctctctcctacgtatagcaacctcgtcctcggtctgggtggtgtcagctccgctacacagctcccagagagccgctatgcaagccatatcaagcctgctgactacctcggcgtgcgctacgataagcacttccctctgacgacgactgacccctcggcaggcttctatatggatggcctaccaggtatcatcgaccctcgtgcctataagaccttcatcatcgctggtgatacggagaaccccgacttctgctactatccctcgtggagcaaggccgctacgacgaccgagtacaagctgaaggatgctaccgacaaggagaaggacttcaagacgatcaatgctaagtacacgtggaatgcgtgggtaggtggatcgtggggtgacctcaatgccatcaacgacctcgtgcaggtcggtacgatgccccgcctcggtctgaagtaccgcaacagcacgaataagcgtgtcttcttcggcgaatgggagacttacttcctcatcgctgaggccgctgtacgtggctggacggtgcctctgacgggtaaggacgcctatgagaagggtatccgcgcgagcttcgcctatcagggtgctggctccgtcgatagctacctcacctcacagacctacaaccgcgtagggacgtccgtcgcttgggatcacaccacggagcccgcagctaccgtgacgatgaagtgcacgaacggctacacgggtcagacggagaactacacctaccgctatcctgagatgaagagccgcctctataaggcagctatgaacgaccacctgacgaagatcatcacgcagaagttcatcgccaacacgccttggctgcctctcgagacgtggagtgaccaccgtcgtctgggtcttcccttcttcgaaacgcctgcggtagagaaggcgctggacaacatgccccagctcaccgcctctacttactccacggtgtctgtcgactactatcctcagcgtctgcccctgcctagcagcatcgtcaacggcaataagcccggctatgaatctgctatcaaggcactcggtggcgaggataaggtcttcacgcccatctactgggctaagaagaagcagtaagctcgcttcctccaccccttacctataaggcaagcgcctcccgcctacgagtccgaggactcaggcgggaggcgctctgctttataatagtatcggcttcgctaaggcaggagcagcgagctgtcgccgtagctgaggaagcggaagtcgtgggtgagtgcccagtcgtagacgcggtgccagtcgtcaccgatgagggcagcgatgagcaagaggagcgtgctgtggggctggtggaagttcgtcaccataccgcggataacgcggtagcggtagctgggagcgatgatgatgctcgtggggaagacgagggtatcctctccctgcgcatcgagatagctgaggagcgtgtcgagggcttcctctgtcgtcaactcttcgtccgcgccttcttcgtaggggagccactgctctacgtgcagggccgttggaggcgtgtcgggctgacgacgcagggcgatggccagatgatagaggctctccagcgtgcggacgctcgtcgtacccacggcgatgatctgcccgatatgctcacgaagggcgaggagcgtcgagcggctgacgctgatcagctccgcgtgcatctcgtgatcgccgatgtgatcggccttgacagggcggaaggtgccagcgcctacgtggagcgtgacgtccagcacgggcgtgccctgagcgcgtagctcttcgaagactgcgggagtgaagtgcaggcccgctgtgggggctgctaccgagccttcggtctcggcatagaccgtctgataggtcgtcagatcctgctcctccgtctcacgcccgaggtagggtgggatggggaggatacccatcagctctaagagttcgccgaaggtataggcatcattgtcccaagagaagtggatgaccccctcctcgccgcgctcagccgtcagcgtcacttcgccctgcccctcgcggtggaggaggcgggtgagctgcgtgccctccttgaagcgcttggcattgccgatgaggcagtgccaggagcagcgatggcgctccccgagggagagctcgtaggaggtgggggcagcgggatcgaggcagaagatctcgatgcgcgctcctgagtccttatggaagaggaggcgggcacggatgaccttggagttgttgcgcacgagtacggcgccctcgggcaggagacggggcaggtcacggaaggtaaattcttcgatctcgccagcttggtagcggaggagcttggagctgctgcggtcggcaagggggtacttggcgatgcgttcgtcgggcagggggtagtcgtagtcggctatctggatctcttggggtcgtatattcatcttacgctcttagggggaaatatccctgatgtgggtggcacaaaagtacgcaaaagcgccccaagtgcctctgccccgcaccttagctccgaccgccgaggtgcggatggagggaatacctaatcatagtgccttgtagatgaacaactactcgtttgtgtacgaaccactataagtacgaggtgcgaaccactattcgcttgcatccaaaccactactggttctcacctcgtaccactattggtttgctcgcaaacgactattgctccgcactcgtagtgtctatccttagtggacttcgggaggggggtggtgcgaacctatattggtcgctgagtcaacctatataggtcatcacgccgacctatatagatcgcttcacggacctatataggttggctcagcgatccatataggatgatttaccctccagtacagcttcctccagctcggctctatcagtagggggtggaataggtagaatatatatctttgaccctcaaggagcggctatgcctatagctctctttcctcgatatgcaccgtgaggcgcataagcgaggcgcattcgatcaggttccccagctccccgaggagggagccttttacttaaatagccgagttatgactgtacgcaaactcttcaagaagctccatctgtggctttccctgccctttgggctcatcattatgacgacctgcctcacaggggctctcctcgtcttcgagaaggaaatcaccgagttggtacgccgcgatagctatacgatacccgtgcgtaagacggggagactctccctccagtccctcctggagcgggtcgccagcgagacgcccgatagcgtgcagatcacgagcgtcaccataccctctgacttccgccgcgcctataccgtggggctctctaagcctcgtcgtgcgggagtccttgtcgatccctatacgggtaagatcgtggggcagagcgggcgcctccccttcttcacgacggtacgcgagctacaccgctggctactcgatagtatgaagccagatagcgaagggatcttctgggggcgcatcatcgttgggacaagtacgctcctcttcgtctgcatcctcctcacggggctcttcctctggtggccgaagaagctcaaggggatagggaagcggctgaagatctcgcttggtcgtgggcgtcagcgcctcttcaccgacctgcatacggtcggtggggtgtatgtcttcgtactcctcttagcgatggctatgacggggcttacgtggtccttcgagtggtatcgcacgggcttctataaggtctttggtgccgagatggccgaggcgggcaagggtgataagggccccaagaaggataagagcaaggatgccccccgtgaggagggtgccgagcaggccaagctccctgcctcctatatctattgggaggaggctgtgagctatgtcatagaggcctccgaagcagactatacggagatcacggtcaaggatggtgaggtcgaggtaccccttgctggactgggcaatatccgtgctgcggatagctttcgcttcgacaaaaagacagggcagatgaccgactacaaggcttatagtgaggcgaagcgggataagaagctccgtggctggatctattcgattcacacaggggcttggggcggtctcttcacgcgtatctgctacttcttagcggcgctctttggtgcatcgcttccgctgacgggctactatatcttctaccagcgtaagtgggggaagaagcgtaaggcgaagagcggtagtaaggcttaggacatctggccccaggaggggcgctcatagcgcctaccttagcgggcctcgagaggggctgatgcgaaccagtactggtcagcgatcggaccagtactggtaacatatagtgaccactactacttcgcacgtcgaccagtactgctcggatcactgaccagtactgcttacttttcccctatgagtacgaatcacccatagaggaggtatgaaggatagaaagcttgtgggaaagagcggcttaggagatctggctccaggaggggcgctcgtagtagatctcgtggaggcgatggcgcaggatctcgttcttcgggagctgtaggtcggggtcttcgctgaggatctcctcggcgagggtacgggtgtactgcaccatggcgccatcgagggccgggttggcgatacgtaggctcagctgctgaccgctctgacgcgtgccgtcgatctccccgaagccacgcaggcgcatatcctcttcggcgatgacgaagccatcattcgtctctaccataatagcgatgcggcgcttggcatcttcgccgaggtccttgcctgtgaccaggatgcaatagctctggctggcgccacggccgacacgcccacggagctgatggagctgggagagcccgaagcggttggcaccctcgatgaccatcaccgaggcgttgggcacgttcactccaacctcgatgacggtggtcgccaggagtatctgtgcttcgcccgagacgaagctacgcatggcctcgtccttctcatcgggcttcatcttaccatgtacacgcacgatcttacggtgggcgaagtgctcgctgtagcggcggaagccttcgtcgagcgtgcgcatcgactcctcttcgctctcctcgatcatagggaagacgacataggcctgacggccctcctccagctgacgctcgaggaactgatatacccgatacatctcgctctcactctggtggtaggtctcgataggcttgcgcccgggtgggagctcgtcgatgacggagatatcgagatcgccatagagggtcatagcgagcgtacgcgggatgggcgtagcgctcatgatgaggatgtgcgggtggatctgctcgcccttctgccacagccccgagcgctgcacgacaccgaagcggtgctgctcgtcgatgactgccagcccaagatgggcgaactgcaccacaggctctaagagggcatgcgtgccgacgatgatcttcagcgcgcctgtgctgagatctgcgaggaggcgtgtgcgctccttcttcttcgtgctcccgatcagtaggcctacctcgatacccagcggtgcgaggtattcgcagagagaagcgtagtgctgacgggcgaggatctcggtgggcgccatcatacacgcctgatagccgttgtccacgctgagaagcatggagaagagcgctacgagggtcttcccgctccctacatccccttggatgaggcgattcatctgacggccgctgatgacatcggcttggatctcgcggatgacacgcttctgcgcatccgtcaggtcaaagggcagactctcatagagcccacgtatggcatcgccgacacgtggcaggagaagcccaggagaagcggccttacggtcacgcttcataccgaggagacggagctggatgaagaagagttcgtcgaacttcaatcgtctgcgtgctgcctccagtccctccttcgtcacggggaagtggatctgctcgatggcctcggcataggacatgaggcgtgcccgctcaatgatctcgggggtgagcgtctcggtaatgtggggtacgcaggcctccttcagcacatagaggagctggcgcatctgacggctattcagcccagcgcgggtgagcttctcagtgaggggatagacgggcatgaggccaccgctgacctgtgcggccttcgactcctcgtcgatctcggggtggctgatgctgtaggcgccgttgaagaagacgggcttgccgaagacgagataccactgccccgggatgtagcgctggcggatgtagggcatggagcggaaccataccagctcgatcgtgcctgtgccatcggtgaagtacgcgacgagacgcttcttacgcccctcgcccacctccttgaagtcacggatatagcccttcagctccacgtggggcatctcacctcggagctcacggatctggtagatgcgcgagcggtcgacgtacttcgtggggaagtaatgcaggaggtcgaggtaggtatataggtccagctcctcggcgagcgctttcgctctccgcggtccgacacctgggaggtaggtcagtggggtgaggaggaagtccttagccatcgtagcgcctgcccttctcgggcggggttagtccagaaggagatcagccaagaggaggtctctcggtgtggtgagcttgatattcgtctcttcgccttcgacgagcgtgatagcaccgaggccagcagcttcgtagaccgaagcgtcgtcggtgaactgcgggctgaagggctgcttataggcgtggtgtaggcgctccaggtcgaaggtctgcggggtctgtaccgcacggtagcgggctctatcgacagcctcgttcgtgtcgtcctcaccgaggaagcgcaggctatcggtgacggggcaggcaggtagagcggcacccgtctcttcggctacctcgaaggtgcggcgaatcagtgtgcgtgacacgagcgggcgcaccccatcgtggacggcgacaaggccctcagcggggagctcgctcagccccgagcgtacggagtcgaagcgcgtggcgccacccgtggtgatgcggtgtgggagggtgaagtgatgctcggcacaaagctctcgccagaggtcttgctgctcggcagggagcacgaggatgagttcctcgacctcgggggcgaactgccgtagcgtgtgcatcaggacgggctcaccacgcagggggaggaactgcttcggcaggtcggcacccatacgcaggccgcgcccgccagcgacgatgatagcgtagcgatgtgccattagccttcggcttgagggtcttcgctgagctgtgccatgaggctcgtgagctgcttgtcggcctgtgtgagcttctcacggcagtgcttcgagagctcgacagcctccttcacgaggcccgtgagctcgtctacatcggggctctcgctctcgatgcggcggacgatctcgtcgagacggcttgcagcttccttataggtcaagtcttttttcatcgtatgtctatgtgttggtgccacgagatggtggcgggggatacgtgcgtctacggcatccagagtggcacactcttgccttagcgggcggtgtgctgcttgcgacgggagtcgatgccgaggaagatgaagagcaggaacgtgaagccccacagcgaggagcccccgtagctgaagaagggtagggggataccgatgacggggacgagccccagcaccatccccacattgatgaagaggtggaagaggaagatcgaggccacgcagtagccatagacccgcccgaagcgtgtcacctgccgctcggcaagcgccacgatacgcaggatgaagacggcgtacatgatgagtagcgccgttgagcctacgaagcccgactcctctccgacggtgcagaagatgaagtccgtctcctgctcaggcacgtagttcagcttcgtctgtgtgcccttgaggaagcccttaccggtgagcccacccgatccgatagcgatcttcgactggtcgacattgtagcccttccccttgaggtcgctctcgatgccgagggcgatcttgatacgtacctgctggtggggctggaggatatcgttgaagacgtagttcaccgagtagaagaagccgagcgatccgatggcgaagatggccatcaagaggtagcgcaggaggtattcgcgcagggcgaggtagaagagtgtgcctacggcgatgacgacgagggctacagccacataggcgaggttgaaggcgacgaagaagttcaccactcctgcgatgagatacacgccgaggacggcacctacggcgtagaggaggtagcgccagcggttgcgccagtcctgggtgtagacggcgtagagggtggtggtgaagacgaggatagcgttcgagacgaagaagagatccgcgtccgtagcactccaccatagcgtgtcctctaagaccagcgccccgatgaagtacaccgctgccgaggcactgagccccatgaagagccctgagaagccttcgcggaagagggcaaggaagagggcaaggaagacgagcgccgagcccgtctcctgctgcaggaggatgagcccgatggggaagaagatgatagcgaagatcttcagatagctgcgtatcgactcgatcttgaagtcatactgattgcatagccacgccagcgtcagggcggtagcgaccttcgcgaactccgccggctgtaggcgcaccggccctaagacgagccacgagcgtgagcccttgatatccggtgcgatgacgatcgtcaccatcaagaggagcatcatcgccccatagaagagcggggctcccacctcatagatgtccgtgtcgagcgagatgacagcgaagcctaagaccagcccgaggccgatccacagcagctgcatcatcgggcgaccgccagggctcagcagggcctccgtctcgaagttgtacgaggcgccacagatagagagccagccgaagaagaccatgatgaggtacatcaagatcgtcacccagtcgatggacttatagaatggctgtgaggaggactgtcgcatggcgggcgctatatatcgttgaggtaggagatactgcggtgctccatcgaggaggcgatggcctcgccactgcccgagagcttgccgtcacggagatagtattccatcatcacacggccgataggcacaccgaactgcgcaccgaagcccccgttctcgacatagaccgagacagcgatgcgtggcttggagcgaggcgcgaagccgatgaaggccgagtggtccttaccgtggggattctctgccgtacctgtcttaccacatacctcgatctcaccaggagcgaagttcgcagcacgacacgtaccgcccgtgacagcaccagccatccctgcgacgatatactcccagttctcgcgggagatccctgagggctggtgattgcggtacatcgagtccagaggcataccgccgatggagtgcacgacgtgcgggcggatgtagtagccgcggttggctatgagggcggcgagattcgctatctgcaagggcgtggcgagcacttccccctgcccgatggcgatggagatgatggtgtgaccgttccatgcgcccttgtagaacttatcgtagacgccgctattggggatatatccgcgcttctcacccggcaggtcgataccgaggcggtagccgaaaccgagggagaccatacgctgcttccagtgctccagtgcgacggctgccgaggggtaatagcggcggtcgtcgagcatgaagtgcagaccccagctgaagtacgcattacacgaagtggagagggcggggatgagtgaggtgggcgagccgtggctgtggcacttgggtcggttgcccagcggggggtaaccgtgatgacaggcaagtgctgtggagggtgtgaggaccccttcctcaaggaagatagctccctgcgagggcttgaaggttgagccaggagggtagttcccttggatcgcgcggttgaggagcggcttaccgaaggtctcctcaagcatgcggtggttggcacccttgctcttcccagcgaggagctcgggatcgtaattcggtgccgtgacgagggcaaggatctcacccgtctcgggctcaatggcgacgatggcaccacgcttaccgcgcatcatgcgctcgcccagctcttgcaggccagcatcgatggagagcgtgaggtcacgccctgggacgggagcacggtcgtgcgaaccgccatccagacgtccttggatacggccacgggcatcgcggtagaagatctcctcacccttgacgccacgcagtacctcttcgtaggtgcgctctaccccgcttcgtccgacgaagtccccgcgcatgatcgtgctgtcacgctcgaggtcagtaaggctggcttcggagaggtagcccaagaggtgggcggcattgtggtagttgtactgtcggacggtacgggagcgcaccgagaagcctgggaacttatacagctgctcctcgaagcgtcctacttcctcgggctcaagctgtgagaggaagacctgcggggtgtaggggttgtagccgcggttgatactgcggtcacgtacggcggtgagcttctggacgatctcctcgcgaggtaggctaagcgtatttgcaagtagtgtggtgtcgagctttcccttcgcctcgtggttcacgatcatcaggtcgtatatggggcgattggccacaaggagctgtcccttgcggtcgtagatgacgccacgcgaggggatggtagagaggatgaagtaggcattattctccgcccggcgcttgtagtcattgctggctacttgcagggtaaagaggcggatgatgaagatggtgacgatggcgaaggtgaggccgatgatcagccaccgtctacggaagagctcgtcgttgaccataggagagcatcacttcgagcgagccccttcccccgtgccgaagaagaagagggtcatcaccgccagcacccacgagaaggcatagcccgaggcgaagctgatgatgatatgtagggcccccatgcgcatccctgcggcctggaggatatagagcgtgacgtggtgcacgagcaggagcagcgtgatgagcatcaccgagcctccacgcagcgtggggaagaggggcagggcgtgcggtatcgtgttcttgtccgtgagcagtgagaggatgggctggcgcatgaaggctgtcagcgtgaaggctgaggcgtgcaggccaggcgtgaggctgaagatatcgatgagcatccctacggcgaagcccgagatcgagagtacggtgcggttcgtgtctaccggcaggagcagcagcacgaagggatagaggtaaggggtcgccacacggaagagggcgatgggactcagtacccacacctgcagggccaccataaggagggcgaagaggatgaagcgcagataggtggagctattcattgggtctgatcgagtcttcgagggcgcgtacctcgtgggtgggcttctcacggatcacgtagacgtagcgtagaccctggaagtccgtggagaggtgcacaggatagttggcgaaggtcccagcgctgcccttgacgcgagcggggacggagtcggcgatcgtcccgaccatcatcccctcggggaagaggtaggagtagccactcgtggtgatggtgtcaccgatctgggggtgggcgtgtggggggacgttgctgaggatcgcctcattggcattcgggctcgaggaagctgtgagggtgccactgacctcctgcccgaggagggtacatgccaggcgaatcttcgggttgaggacggggatgacgagcgcgtagtggtcggagaccgccatcacggcgccgacgacgcccgaagcactcatcacgcccatgtcggtctcgatgccgtcacggcgccccttgttgatggtgtagtagacctcacccgtgtgcgtcacacgattgaccactcgggcgatgatgactgccgagggatcgatggggaggctgtcggtagcgtgcagacgaggcagcaggccgtgggcttcggcgtcctgcatctgacgtgccaggagggtataggccgtacgtagacgtgcattctccctcagtagctcctcattgcgagggcgcaggcctacatagctccagccctcggtcatcagctcattgacccgcccaaagacggcactcgtcgcgtaccagccgaggctcctcgagtagagggagccacttaggtacgtgacgagagcgatcgtctccaagatgaggaagacgaaccagtgtctatacttctggaggaactctaagagcttatccacgggcggagtaggctacggggcttagcggaagaggaagttgaagttgtggatgttcttcagcgcaatgcccgtaccgagagctacagagtgcagggggttctcagcgatcttgaagtcaagaccgaagcgcttggagaggcgcttgtcgagaccacgcaggagggcaccaccaccggtgaggacgacaccattggcgacgatgtcggcgtagagctcgggaggcgtagcctcgagcgtgcggaggatagcgctctcgatcttgccgattgagttgtcgaggcactcggcgatctcacgatagttgacctctaccttgcggggcatggtatccatcatgtttgcaccccagacggtgaagtctgcgggagcgtcatcgaggtcagcatagacagcacctacctggatcttgatctgctcagcggtacgctccccgaccttgatctggtgcttctcgcgcatgtgatccatgatgtcctgcgtcagctcgtcgccagcggtgtcgatggactgatcctcgacgataccaccgagcgagatgacagcgatctccgtcgtaccaccaccgatgtccacgatcatatggccttcgggggcaaggacgtcgatgccgacgccgatagctgcagccataggctcgtagatcatgtagacgtcacggccaccagcgtgctcgctggagtcacgtacggcacggatctctacctccgtgctccctgaggggatacagacgaccatgcgcagtgagggggtgaaccacccacggcggcggctgatcatgcggatcatcccgcggatcatgtgctcagcggcatcgaagtctgcgatgactccttcgcgcagggggcggatcgtgcggatgttggcgttgcccttctcgtacatctcacgagccttggtcccgacggcgatcatctcgcccgtgcggttgtcgaaggctactactgagggctcatcgagtacgatcttgtcgtccttgatgataatggtattggcagtacccaggtccatcgccagctcctgcctaaaggaaaatagtcccatgcttatctattagtcgattcgtattcttagtgcttgaagtgacgcacccccgtcatcaccatggctacgcccaggcgatctgcagcggcgatgctgtcagcgtcacgtactgagccaccaggctgagcgatagcggtgatgccagcttcggcagcgagggtgacgcagtcgtcgaaggggaagaaggcatcgctcgccagtacagctcccttgaggtcgaagccgaagtggcgtgccttctcgatggcttgcttgagcgcatcgacacgtgaggtctgtccgacacccgaggcgatgagctgaccgcccttgccgaggacgatagcgttgctcttgctgtgcttgacgagcttggtcgcgaagaccagatccgtaagctcctcagccgtgggtgctaccttagtaacgggcttcatctcagccgtagtctctactgcgcggtcggtctcctgagccagcacaccaccgagcatcgagcggtaagaccagcgggcatcgatggcctccttctgacgcaggaggatgcggttcttcttgccctcgaggatggtgagcgcctcggcatcgaagtcgggagcgatgagcacctcgaggaagagcttgtcgatctcgcgcgccgtcgccacgtcgatggggcggttggctacgagtacaccaccgaaggcagagacggggtcacctgccagcgcatccgtccaagcctcgaggagggtggggcgagaggcgcagccacaagcgttgttgtgcttgaggatggcgaaggtgggctcagtgaagtcctggatgagtgagacagctgcctcgacatcctggaggttgttgtaggagagctccttgccgtggagctgctcgaagtagcggtcgaggtcgccgtagaagacgcccttctgatgggggttttcgccgtagcgcaggggcttagcttcgtctgccgtgaggcggagagccgagtggtcctcagcgtcgaagtagcggaagatagccgagtcgtagtgcgagctcacagcgaaggcgcggcgagcaaagtggcgacgctcctcaagggtcgtgcgagcgccacgctcacggaggatctcatgcagcgtagcgtagtctgcctgcgaggggatgatgacgacgtcctcgaagttcttcgctgccccacggatgaggctgataccgccgatatcgatcttctcgatgatatcttcttcgctggcgcccgaggctaccgtagcttcgaagggatagaggtctacgatcaccaggtcgatgagggataggccgtattcgaggacctccttttggtcggtctcgtgtccgcggcgggcgaggataccgccctggatagcggggtgaagggtcttgacgcgccccccgagcatcgagggatacttagtcaggtcttcgacggcaacacaagggtacccgagcccttcgatgaaggtgctggtgccccccgtggagacgaactctacgccctgctcgtgcaggagctttaagatttctgctaatccttccttgtggtataccgagacaagtgctcgacgtatgaccttctccatgagttactaagctaagtcaaagtgtgatgtaaaatacggcgatcagcacctcacctccactcggaggctatccgtgctaagctactaagccacacaaaaataacgattttcccgcagtgtacctatctcgcgcgtattgtgagggcttctatcccgcccgtgagtacgccccgagtcacactattacttcggccctactacctccgcttgttttcttgctctcctcgtcgggtaagtcgcttacatctatacggatagataccttcattcagcgcgagaactatcgcagagcactactcctatacttcgtcccttgaggggagattctttggctcatctatgggaaaagttcggtctacgtacgtggatcatttgtccacgtacgagcgctctaaaatccacgtgccttgtcctatcgtctacgtacgtagatcgagggagtggaatatgacttcggagctttttctcgtgagggtaaaggctttcccttgggtgctttgtgaagcgcaccatatagaagcgcacgggctgcagtaccgaaggtgtactgcagcccgtgcggtgaaggggtggggggcttagacgaagaggagttgctcgagggcataggccacaccgtcctcggcattggagcgggtgacgaaatccgcacggcgctggatatcctcgggcgcattgcccatggcgacgcctgtgccggccagctcgatcatctcgaggtcgttgtagttgtcgccgatggcgatgaggtcctgtggggtcatgccgaggacatcgagtaggcgagcgagtgcactgcccttattcacaccaagggggacgagctcgaggaagtagtcgctggagcggaaggcgccgacacgcgtgccgagctgctccttgacagcggcctcgagcgggatgagcttctccagagggccgacggcgaggcacttcgggaggctttccgtagcggcctcgacgaagttgggtacacgcttgaggggcatgcccgtgatgacgacttccttctctgcgtaggggtcatcttcgcgctcggtgaggatgtgctcctcggtgtaggtgaggatgtttgccccatgctcctgcacgaggcggtagagctgggggatgaggtcggcatcgaggagctgggcgctgaggaggcgcttggagcccgcctcgaggatcttcccgccgttgaagggcatgaggtagccgccgtagtccgctatctgcagagcttcggccagcgcaccgagggcaggggtggggcgacccgaggcgaggatgatgcgggtgtcgtagtctctctgggcacggagcagggccgagcggacgccctcggtgaggacgtgctccttggtgatcagcgtgccgtcaatatcaagtgctaatagtttcattattcagtctttgtggagtataaatcgggggcgagaggcttagtgtgcatcgagccacgtggggccatggccgatgcttacctcgaggggtacgcgcaggtcggggtagacggactccatcgtgctgcggaccagctcggtcatctctgcgagctcgtcggtggggacgttgaagttcagttcgtcatgtacctgcaggatcatacggctcttgagacctcgctcacggatagcggcatcgaggcggatcatcgcgatcttgatgaggtcagcagctgagccttggaggggagcgttgatcgcattgcgctcggcatagccacgtacgacagcgttcgcgctattgatatcggggaggctacggcgacgatcgaggagggtcgtcacatagccacgatgcttggcttcctcgacgacgcgtgacatatagtttgccaccccagggtacgaagcgaagtagccgtcgatgagctccttggcttccttgcgggggatggagagacgctcgctaaggccgaaggcggagataccgtagatgataccgaagttcgcggtcttcgcgcggcgacgcatatcgggcgtgacctcctcgggtgtgaggccgtagatcttcgctgcggtagcctgatggacatcttgcccagagcggaaggcctcgatgagggcggggtcttcgctgaagtgcgccatcagacgcagctcgatctgcgagtagtcggcgctgaggaaggtacagcctgtatcgggtacgaaggcctcgcggatggcacgaccctcgggcgtacggatggggatattctggatgttggggttgctgctggagaggcgacccgtggcagcgatggtctggttgaaggacgtgtggatcttcccatcggggtagacgaggtcgggcagcgcctcgatgtaggtgctgaggagcttcttcacgccgcggtagtcgaggatcttgcccacgacggggtgcttgtcacggagcttttctaaaacttcttcgctcgtggtgtagccccctgtcttggtcttcttcgccttctccatgatctggagttcgtcgaagagggcttcgccgacctgcttgctgctattgacattgatggggtggccgatgagcgtgctgatctccgcctcgaggcgctccagctggctctgtagctcgcccgcttggcgagcgaggcacgccttgtcgaggcgtacgccctcgcgctccatgccgaggagtaccttcatcagtggcatctcgatggtgcggaagagttcggtaagccctgccttctcgaggcgctctgcgaagtactcatagaggaggtgggtgatgtgcgtatcctccgcagcgtagaactgcaggcgctcgggctcgacctgacgcaggtcaaactgcttcgtcgtctgcggggcgatcatctcctcgaagggcatcatcttatagctgaggaacttctccgccagctcgtccagcccgtggcgcatatcggggtaaagcaggtagtgcgcgatcatcgtgtcgaagtgctcgccagccgtctcgatgccgtaggagaggaggatatggaggtcgtacttgaggttctgcccgaccttcagcgaggtcgtgctctcgaagatggggcggagctggtcgaggagtgccgtagcggcctcacgctcagcgggcacatcgaggtaataggtcgtctctctgtcgagggcgaaggtgatggctaccagctctgccgtcagcgcatcggcgcccgtggtctcggtgtcgaaggtgacgacctgggcctttgccgcacgctcgacgaaggcagggagggtcgtcgggttgaggacctcgatgcgcatctgtggtacatccgtgggggcaggtgtctcggcttcctcggtctcctcgagtcctgcgaagaggtcatcgggagggagagcgaccttctttggggcgggtgcgggagcagtgccgaggacgcgagagaggagcgtgcggaactccagctcctcgaagagtcggcgcaccgcctcttcgtccttctctctgcgggcgtagtcgccagcggtatagctgatgggcacgtcacggcggatggtcgccagatagtaggagaggcggatgtcgtctgcgccctcgatgagcttcttacccgtagcccccttgatctccgaggcgtgggcgaggaggttctctactgtaccatattcgctgaggagcttctgtgcgcccttctcaccgatacccttacagccggggatgttgtctaccttgtccccgaggagtgcgaggtagtcgatgacttgtgcgggggagccgaggccgaacttctcccgtatctcggcttcgccccagatctcgtagcccccgccctgcatcgggcggtacatacggacgtgctcggtgacgagctgcccgtagtccttgtcgggcgtgaccatcagcacctcgtggcccgcgcgagccgccagatcgcttagcgtaccgatgacgtcgtccgcctcgaagtcggggacttcaacagcggggatgcggtaggcggccagaagctcacggatgagcggtacggcgatgcggatcccttcgggcgtctcttcgcgctgcgccttgtaagcggggtactcgcggtgtcggaaggtgccacctgcggggtcaaagacgacggcgatctcctcgggattctccttcgataggaggtcctccagcatgaggacgaagccgaagacagcactggtattgcgccccttgctgtcgaagcgtggggctttgatgaaggcgtagtaggcgcggtagatcagggcgtacgcatcgaggaggaagagtcgctgggccatatcggtgggatgtgaggggcttgtggagtgggagagatgatggattgtctgagggcgtgcctgcgggggatgcagtcggctcacagggacctattatgtaggtatacaaaagtacttacttagcccgtactgcgaaaaacggacgtttttcccgctctcctcaggcgtgcttcctcgcccccttagctctcgcatatacattatatataatatatatgtgcgcccgcgcgccacgcgagagaaaaagagccgccccacagcagttcactgatgtgactcgctgtggggcggcttggtgatgtatgggaggagcctccttagaggaagcgcaggtattgggcgatggtcgtggggaagaagcggtgctccagctcgtggatgcgcgtggcgagcgtctcgacggtgtcatcaaggcgcacgggacaggtcgcctgcaggaggtgacgcccgtggtcatagtcttcgtcgacgaggtggatggtgataccactctccttcgctcccgaggcgatgacggcagcgtgcactcggtcgccgtacatgccttgaccgccgaaagaggggaggagtgcagggtggatgttgatgatgcgctcggggtactccattatatatataggagtgatgaggcagagatagcccgccaagatgatgagctcgacgccgtgctccttcatcagagctatcgggtgcgtgccttcacgaagctctgcgtttgtaaaataatgacaaggtacacccagtctttcagcccgctggatgacccctgcctgaggcttgttcgtgatgatcatagccacctccgcctcgcctgtagcgcggaaatgatggacgatagcttcggcgtttgagccattgccagaagcaagtattgctatttgtttcataaatagttgtatctttgtgcacaaatggagcgtatctgtgcagtgcgtaagcgccacgcgggaatactccgagctactcccctgagtgccgctcattatacggtacaaaggtagagcaatgcagtgtaaagaaagaatacataactaagtaaagaaaaagaatcatgtcacagatcaacgaaaaggtagtcgaaatcatcgtcgaaaagctcaactgcgaagcaagcgaagtaactcctgaagcaaacttctccagcgacctcggtgctgactctctcgacaccgtagagctcatcatggaattcgaaaaggctttcgacatccagatccccgatcaggacgctcagacgatcaagacggtcggcgacgctatcaactacatcgaaagcaagaaggcttaatagccctctcgtcgagataaaggaatttgctgatggaactcaagagagtcgtcatcactggaataggcgctatctcacctctcggggctacggcccgcgagacgtgggaggctgtcgtagcggggaagagtggggcaggccccatcacgctcttcgatgcctcaaagttcaagaccacgtttgcttgcgaagtcaaggaatttgacgtgagcaagtatatcgataagaaggaggctcgccgcttagatcgctatgctcagtttgccatggtggcagccgaagagagtatcgccgattccaagcttgacgtagagacagtaaataagaaccgtgtcggggtcatcatcgcctccggtatcggtggtctcgggacctttgaagaggaagtgcgcggctatgacgccgaagcaggtcctcgcttcaatcccttcttcatccccaagatgatctcggatatctccgcaggtcaggtgtcgatgaagtatggtttccacgggcccaactactccacggcttcggcctgtgcttcgtctacgaacgcactgatcgatgcctgccacctcattcgcctcggtaaggccgacgtcatcatcactggtggtgccgaagcctctatctgcgctgctggtgtcggtggattcaatgcgatgaatgccctctccactcgcaatgacgaccctcagggtgcttcccgccccttcagcgcttcgcgtgatggcttcgtcatggccgaaggtgctgcttgcctcgtcgtcgaggagctcgagcacgccgtcgctcgtggtgcacatatctacgctgagctcgtaggtactggcctctcggctgatgcttaccacctcacggctactcaccctgatgggctgggtgctaagctggtgatgactaatgcactcgaggatgcagggctctcccctgaagatattgactacatcaacgtacacgggacttctacgcctgtcggggatatctccgagtccaaggctattaaggaagtcttcggtgacgctgcctacaagctgaatatcagctctacgaagtctatgacgggtcacctcctcggcgccgctggtgctatcgaggctgtcttcgcgctcaaggccgtagaggaggacattgtcccccccacgatcaatcatgctgccgacgacggagatcccgagatcgactacaagctgaacttcaccttcaaccaggctcagcgtcgtaccgtccgtgctgccctgtcgaacaccttcggtttcggtgggcacaacgcgagtgtcatcttcaagaagtacgagaagtaatacggctccacagccacgtattatcaagactccctctatagctctatgattatacgtatcgtgcgagacggacttatgaggctctttgggcgcaagcccaaggagcctctcttcctactcgtcgagctcctcggctttgaaccacatgaccccgagctctacgacttggctttccgtcacagctcggtgagtaagaccgacaaggagggcttcaagctcaataatgagcgcttggagttcctcggtgactcggtgctggccacggcaatgagtcattacctctaccagcgtcacccacactgggatgaaggagagatgagtaagcgccgtggtgctatcgtcgggcgcaaggtcaacaacgctgtcgcccagcgcatgggccttgatcgtctgcttcagatccgtcgcgaggcacgtcagagtagtaccgatatatatggtaatacgctggaggcgctcatcggggcaatcttccttgatcagggctatgcccgtgccgaggcgttcgtccaccagcgtatggtgcccctctttacggagcttgaggcaagcctacgagagcagacgacgaactataagtcgctgctcttagagtggacgcagaagcaccaccttactcttgacttccgtatgcttcaggagccgaagcgcagtggagcacccttcgtctgtggagtctacgtcgatgagcgcaaggtcggcgtcgggagtggtccgaataaaaaggttgcccaccaggatgctgcgcatcgtgcgctcttggctctctgtcaggctgatccttcggtagcagaagagctgagtatcccccagggagagcaggggcttattgacctaccttgatcgaagcgtagccagccctttgccttcagaagtcggtgcaatctgctgatattatgaaggtcaataattgggattcattgcgttttcgtataaaaacgttatctttgccgtgtgtaaatgtggctctatgcgaagggccacagggtgtgtccctgcttacggcttgctgctttaggggcttactctgcctcccatagatgaatgagagatccttgtaaaacagctcaaggtcgcctctctcaaggactttgcgtgcgcctcacgctgtctgccctagcccatctgtgagtgtaaagaagaacgtgtactcaataattaaatatgaatatgatgttaagaaagagtttaattgctgcagttgcttgcctttcactggctcctgctctgcgtgctcagcagacgaccgactccgtgtacacggtagaggtgaaggatgctgataagtatcgtgtagaaacgaatcgcttcggcgctaactggttcgctggtattggtgctggtgcacagatgtattttggtgaccacgacaagcagatgcgctttgtcgaccgtatcacccctaacttcgaagcttacttcggtaagtggttcacccctggtattggtatccgtcttggtgctaatggctataagatcaagggtgtatctggttggacgggacacaacaatgctatccccagtctcaaccgcggtaactacggtggcttcatcacggattggaatcccgctacgcacactggtaaggtctaccagcacgctaacgtaggttatcctctctatgaaaccgaacagcagtacatccacgctcacgctgacgtgctcttcaaccttacgcagatggtctgcggttacaacgaagatcgcttctactcgctgattccttacgctggtcttggcttcgctacgactctcgagcgtgcttctacgacgggtcgtcactctaatgaagtgactgcaagcgtcggtatcctcaaccgcttccgtatcaaccgtgcttgggatatcaacctcgatatccgtggtgcttacgttggtgaccacttcgatcaggaagacgtttctgctaccgtttctggtcagcccgttaatacgtctggtcgctggggtgaaggtctcctgaccgctactgtaggtgttagctacaacttccccaagcgtggttgggatcgtagcacggtcaccacgatccgtgtcaacgaaaacgtcctcaacgacctccgtggccgtctgagcgacctcgaaggtcagaacagcgacctccgtcgtcagctcgaggaagctctcaaccgcgaagttactcccgagaacgttgcttcaggtatgcctcttctggttaccttccccatcaaccgttggacgctcagcaacaaggatcgtgtaaacctcggcttccttgctgaagctctcaaggctaaccccaagctcgtttactctgtctctggttatgctgacaagggtacgggtagcgcaaagcgtaacatcttcctcgctcgcaagcgtgctgaagttgtttacaactgcctcgttaacgagttcggtgtttcagagtctcagctgaagaaggattcgcacggtggtgttgctaacatgtactacaacgacccccgttgcagccgctcagttctgtcgaaggtcgctgagtaatcctcttactccccctactgaccctgggtaggcaactctcgttgcattccagggtcagccccctaagtggcctccctctttagtctgagctattcatagtctctactaagggggaggcccttacatttagctacactacactattgctctctgcatcatttcagtatgaaacacgcttacctcatactggctcataatgagcctgagcttctctcgcttctcatcgggagactggatgatgcgcgcaatgatatctatatccattttgaccgtaagctaacactcttacctgacgttaagacccagcatgccgggctctacatcctcaaggatcgagtggatgttcgctgggctgacgtaagcatgattgaggcagagtataagctcttccatgcggtcgtggactctggccgtcagtacagccatcatcatcttatctctggagtggatcttcccctgaagaatcaagactatatccacagcttctttgctcagcaccagggaaaggagtttatagggctgcatcaacttccgatgaatagccgggctgaccgggcactacattattggcatcctttcactcgatcattccgagggaatggatctatctttgagatcaagcgtatacttcgcttcttggtagttcagatccaggtcctcttaggtatccgacgtaataccacaattcccttccacaagggggggcaatgggttagcgttactcgtaagcttatagactatctcttggagcaagaggatagtgcgctcaccatcttttctcgtacctttggtgcggacgaatacttcgtcccaactcttatttggggtactcccttcatggatcgcctttttgatgccaccgatgaaagtcgaggagccatgcgctatattggctggagggatgatggacagcttatagattttacccctcaggatctccctgcacttcagcagacggagtatctctttgctcgcaaatttaattcgcgtaataaggcatttctccaagagattttagccctatctaccccctgaactgaaggctgatgagtccgctagtctccattatcatccctgtgtatcgtgcagtcgagacgctccctgcatgtttagctcagctgaaggctcagacctatcggccactccagctcgtctttattgatgactgcagccctgacgatggtcttgcatatctcgagagcgagcgctctggcttagaggcttcgggtatagaggtggcgatcctgcatcatgaagttaaccgtggggtcgctgttgctcgtaatacagggcttgatgctgctcgaggtgaatacatctattcggttgatgctgatgaccttttgcagccaacagccattgcagccttagtccaagtagcagaagagtatcgggctgatgtcgttgggtgcgagtacctactacaggaggggacgagtcagcgacctattacgcaacccgatgtgcagacagggagtgaagcttttgctcagatatgttatgggcgaatgaagtggaatctttggctcttcctccttcgtcgtagcctgatagagcggtcccctgcactgcgcttccttcccggtgagaatatgggggaggacctgatgcttatgggaaagttgctccagcgtgcaggtcgagtggctattgtccaccaacctttctatacctatgttcgctcagatagccaaattactagtacttatcgccccgagcactggcagcaagtacagactaatgtcttggagcttgagcgctatctaacgctacaagcctccaaggagtcgttggagcttctccactatctgaagctcaatctcaagcttccccttttgctctcacacagcgcttgcaactatgagcgctggactcgtatgtatccagagagcaatgaatatatcctcaagaaccagcatctcccgctgcgtacgaagctattgcagtggatggcctcacgaggccagttttggtttgtgagactctacgataaggtcgtcatgcagtggctctataaggctctttatcgctaagaatagtagtgtatatgtggaagcttattcagatcctgaccatagccgttcttgtgaacggctcctactattcatttaactttgcgttctgggcttctggtcctaacacaaagatgatcctagcgctcttcggggtgctctggtttctctatgattcgtggcgtggtggtaaaggcgtatctatcccccgcgtactccttggtggagctatcttttcaattctatattcgctagtcaacttagtagctgtagaagtaaataatacggatgactatagctatgccaactatatcaccaccttcttggtgtgggtattctcggtctaccctgcgatacggtgcatacgtattgtccatggagaggtcacgatcccccgtatggcatattacttagtcggcgtgactgtcttccagtgtgtcacggggttattgaatgataacttccccgcgatgcagagtttcacagactctattgtatttacagcgggtgaattctatgaaagtatcgaccgaatacgatgctttagtgttgcactcgaccctgctggtgtgcgattctctcttgttttggttcttatctctacggttatttgtaccgatacagaggtgcagaggagtcggtggaccgtattttcacttctcctatcctattttcttatctctgcactcggaaatatggtagctcgtaccacctctacaggcatggctatggggcttgttctcttgctcttcaggagtaatgcgattggatttaggattcgcaaggagatggtacagacgatagcaacttttagcttgctgctagtcttcttctctgttgctggggttctcctctacaataccagtgaatacttccgaggacaactgatgtttgccttcgaagggttcttcaactacttcaataagggggagttcacgacggggtctacggaggtccttcagaccatgtggcgctggccagaagatgataagacctggatcattggatcgggatggtatggtggtttcgtctacagtaccgacattggctattgccgattaatcctctactcagggcttatcggctttgtgacgtttgcatcgagcttcgtctactatgcctattacttcgctcgcaagtatccccgctatgtttggctctttgtgagcttcttagcaatgactttcctcgtatggataaaggtgtctacggatatcttgatgatttacgtcttcttcttctggttcacagccgaagagagtgatcatattaatgggatattccccgaagcaacaccagagttatgcgaatagtctattgtatcccagctacctccaactcaggggggatggagcgtgtcctgacgcgcaaggtaaattatctggtggggcagggccatgagctcattatcattactacagaccaaaagggtgctaagccttttttttcgcttgaaggttcagtcaagcaatatgacctcggcattaattatgacgagaacaatggtcaagggatcttggctaagctctcggcttatcccaagaagaagcgtcttcatcgtcaacgtttgagcgaactcttggggcagctccgtgcggatatcgttgtctcgatgtttggggaggatgcgacacttcttccccagatgaaggatggtagtcgcaaggtcttagaataccacttctcaaagctaaagcgcctacaatatggtcgcactggtctatggcgtctcgttgacatccttcgcacaaagcttgacgagcgtacggtgagaccttatgatagctttgtagtattgactgaggaagatgctggctactggggagcgctgcccaatattcgagtaattccgaatcctctgccttttgtgtctgaagagacttcaccttgtacctcacacaaggttattgctgttggacgctatgatttccagaagaacttctctaagttgcttgttctctggggacgtattgcacctgcatatccagactggtcgcttgaaatctatggggatggagctctgagaccagagcttgagttgcaggtgaatcgtctcggcctttcctcgtctgtgacgctagctaagccaacccatcggatgaaggaggtataccagagcgcatcaatctatgcgatgacctctcgctatgaggggctccctatggtccttattgaagcgcagcatatggggcttccgattgtgtcgtttgcttgcccctgtggccccaaggatgtgattcatccaggaaaagatggctatctcatctctcagggagatgatgaaggtttccttacggccctccgccggctgatggattcggagactgagcgtgtccgaatgggagctaatgctcgcaaggcttctgctcgctatgacgtggatgccgtgatggggcagtggttggacctcttctcatcacttgtccccaattaatcctctacggtatgaagcagattgtcatctccgcagtcaatctccgcaagggggggacattgacgatcctccgtcagtgcctcgctttcctatctgaatgggctcctgcacatggctatcgagtcacggcgttggtgcacaagcaggagctggcagactatcccaatatccagtatatagagttgccttgggcaattgatggctgggggaagcgtctctggtgtgagtacgtgactatggggaaaatctctcgagagctgggggcaatagacctgtggctttccctacacgatacgaccccacgagttcaagcttatcgtcaggctgtctactgccagacctctttcccgttccttcgatggagactgagagactttcgcttcgataagaagatcccactctttgcgatgtttacccgcttcgcctaccaaattgggattcgtcgtaatcgctatttgatcgtccagcaacagtggttgagagagggctttagcaagatgtttggcctttcggaagatcgctttatagtagcaccacctcagcgagagcagctgccccccaaggagtctacgattcattcagatggtcatcgcttcacattcctctttgctgcgactgctgatgtgcacaagaactttgagctactcaccgaggctactcgcatcttggagcagcgtgtcggagcagaggttttccgtacagtccttactatcgatggtacggagaataagtatgcacagtggcttcactctacgtggggcaatgtgagtagccttgattttgctggatttatgtctcgcgataagctccaggatacttatgccagtactgactgcttggtcttcccttcacggatcgaaacttggggactcccaatttcggaattccttccctataatcgcccgatgctcttgtcggatctcccatttgctcacgaaacagcagctggtgctggtgctgtgggattctttgatccgagctctgccgtagccttggctgatgctatggagcaagttcttcgaggtgatcatactcagctaaagcctgtcccacagcgccccttgctggctccttgtgcacgatcgtgggcagagctctttgagctcctcctgtcgaacgatggtgctacccaaccaaatagctttacccagcctactccttaggcacaagatattgtaagatgaaagttctacaacttggtaagttctaccccatcaaaggtggagtggagaaggtcatggagatcttcactgaaggccttgctgagcgaggctttgcctcagacatgctctgtgcctcacatgatggggagacgactgatatcgtcttctctgaggagtcgcgaatctttcgtacaaagagtctgacaaagctggctgcgacgatgatctcccccgagatgatcttccgccttcggcgtatctgttcagaatatgatatcatccatgtgcaccatcccgaccccatggctactttggctctcttcttttcaggataccgagggaaggtggtcttacattggcacagtgacattctaaagcagaagttcctgctacgcttcttctcgcctttccagagctggctgattcgtcgtgcggacctgatcttgggtacaacgccagtttatgtggaggagtcgcccttccttcgtaaggtacaggagaaaacgtcctttctcccaatcggcgtagacccttacccctggctctcggatgagatcgaagcaatacgtgcgcaatacccaggtaagaagattatcttcaatatgggacgccttgttccttataagggataccaccatctgattgaggctatgacgtatcttagcgatgactatgtcctactcattggtggggatggtcccttgcgtgcagagcttttggccttgaccgagaagcttggcttgcaagagcgagtgaagttccttggctttatctctgataagctcaagccagcctactttgcagcttgtgatatcttctgcctcagctctacgatcaaaacggaggcttatgccattgttttggttgaagcaatgtctctctctcgcccagtcgtggcgacaaagattcccgaatcaggggtttcttgggtcaatgaagatggggtctctgggattaatgtcccagtcgaggatgcaccagccttggcagaggctatccataagatatgtgatgatccagagctttggaagacctatagcaagggtgctcgtcgtcgcttctatgacgtctttactaaagatgagatgatcaatagtctgatcaatatctatacagaactcctaaatccttcaaaatagatcgagtaatgaatactttcgaacgcatcatcaagcgagcctttgactttaccttagccttggtttcgctgatcttcttctcccccctgatcgctctgatcgccctgcttatcaagtgggaagactccaagggggatgtcatatatcgccaggagcgtattggctataagggtaaacccttcacgctatataagttccgctctatgcgtatggatgcagaggcggggaatcgtcctcagctcttcaccgatggggatagccgtctgacgaaggtcggtgccttcatccgtgctcaccacctcgatgaattccctcagctttggaatgtaatcaagggggagatgtcgttcgtcggacctcgccctgagcgccagttcttcattgatcagattatggagcgtaaccctgattacgttcgcctctatacggtacgtccagggctcttctcctacgctaccctttataatgggtacactgacaccattgagaagatgctggagcgcctgcgtcttgacctcaagtatttggataactattcgctctttacggacgttaagattatcttccttacagccttttctattatatttggtaagaaattctgagtaatacacccctatgataatgatcaagagactctctcatgcctggacacttgccctcggtgtcctctcgctctgtgcgctctcctcttgtgattcggctaagaagacgaattatctgcaagatattgagatcgccaagacctatggtgtcaagcatgacactggcatcgttgtacagaagggcgataagctacgtatcctcgtgacgagtatacgcaatcctgagctgacggttcccttcaacactcgtcagactgctcaggcttctactccatccaacatcgcaggtggtctctctctgaacacggcgaatgtcgctcctgctgataccagctcttcctacttggttgatgcgcaggggaatattcagtttcctatcatcgggaatgttcccgtcttggggcttagcttagagcaggtgagtgaagtgattcgtaccaagctcacggctggtcgctatctcacagatgctcacgtcatcacaaagtttgcgaacctccgcgtttatctccttggtgctttcgagggattgaatcagagtgctgcaagtgcggctatcaccgatcgtggttccttccacctagataatgctcagacgaatatccttgagcttatcgctactgtcggagggctctctgagcaggctgacttcggcaagctcaatgtcattcgtcgtgtgggtaatgagtatgtctactaccgactcgacatgcagtcaaagaatatcttcgagtcgcccgccttctacctccagcagaatgatatcatctatgccgagtaccgctatcgtaagcgtgataccgagcagaaggtcctcacgaccctcgggtatgtgacgacggctctctcgatcgcactttctgctgccgctcttattgctctcttcaagcgttagtccataagccctatgtctacacaaacgaatcggccaaatcagaccggtgaaaagactgcggaggtcaatctgcttgatattttcttctacctccttcgattctggtggctctacctcctgagtatcggtgtggtacttgctgtggctctctatcgcaatgctaagcagccttacgtctacgagtcctcggtgaagatcttcatcaaggatgcttcccagcgtgcgatgatggatacagaaatgctacgctatgcacgcgctgctcgtctcaatatggacaatgagcatgtacagctggtatctcgtcgcgtccttgagcgtacggtcaagatggccaatgccaacgtcttctataatgtgaagagtggcttacgcacccttgagctctactccgatgctccattctcgatgaagtttcttgatacgacagagcacaagagcgcctacgaggtagccttccaagatgcaggtcatgtgcgtgtcactcctgcacacacgggtaagagccaggtggtgccacttaacgtccccgtgcagctgggcgatgagcgcttcattattgagcctcatcagaacttcaataccccttgggagtataagcacattgaagttaatcgcatgccattcactcagacggtgcgttattaccagcacgcgattcttgttgctgaaccagagaaccgtgcatctacgttaactctccgcctgcaagaccgtacgaagaagcgtgctcttgatatcctcctcgctcaggtctcagcctacaaccaggaggagatggatatgcgcaaccaggtgtctaagaacaccgcagacttcgtcaatgagcgtcttgctgctctcggcaaggagcttggtcttgtcgaaggggatatggagcgcttccttatgaacaaccgtacccttgactttgaaggtaaggtcggtgtctataattcgcgctcactcgagagcgaagcagaggccttacagattgagacccagctgaagctcatctcctatatgctctcggagttctccaactcgcaccgtaagaacggttacctccccctgaacgtcggggtacccgatcaggcgctggatggttatatcgctcagtacaaccagctcaagtcgcagcgcgataagctcgtcgaaggtgctggtggtagcacggagaatcctgtcatcaccgagtacgacaacgcactctctcagctgcgtaagaatgctatcgaaagcctcaaccagcaggctgctgtactgcgtatgcgcctcaaggatactcagggtcagcagtcaagcctcctctctaagctccccgaggtatctaaccagggtcgcgaaaaggctgatatcgaccgccgtctggagatccgccagcgcctctatacggagctgctgaacaagcgtgaggagtacgctctccgtcaggctatgacgcaggatagtgcctacgtgcttgatatggatgatgctccctcaaagcccgtcagccccaacacgctgcgtgtcgcccttattgcgatcctcataggtcttgtccttccctcggtctacctcatcatccgtctgctggctgacaataaggtgcgctcgcgtaaggatgttatggaccgcgtctcgattcccttccttggtgatatccccagagaagagaagcgtggtggcaagaagtcccagcctcgtggtgtgcgtgagcagggtggtgacgaaacctccgaggccttccgtgtcctgcgtgagaacatgcgcttcatgatcggcaccggaggtaagaaggcgaagaaggttatcttcacctccttcggggagtcggctggtaagtcatacgtctcgtacaacctcgctcagacactcaccttcgctggtcacagcgtcgtcctcgtcgaccttgacctccgtaagggtacgctctcacgtcgtatcggtctggctggtatgggggctactgagtatctctctaaccccgacgtacgccttgatcagatcctccacaaggatcccaatgcgccgaaacttcaggtcatcacctcgggtgcggtacctcctaaccccgctgagcttctcctcggagagcgcctcgatgagctggcagcgaagctcgctgagcagtttgacttcgtcctcttcgacaacgtgcccttcggtagcgtagctgacgcagctatcgccaaccgtatcgccgaccttacgatcttcgtcctgcgagcaggccgcctcgaccgccgtgctctgcccgagctgcagcacctctatgatgagaacatcctgacgaatatgtcgatcgtcctcaacggtgctactgagagtggtcacggctacggctatggttacggctatggttatggctacggctatggctacggctacggcaacaagaagaagaaaaagggtcttctgcgccgcttaggcctccgctaatcttcataagagcccaccccatccataaggacgggggtgggctctctcatactccttgctacgctactcagagtagccgaagggtgagccttaaggcgccccttcacctatcttattcaatgagtctacccacgccgcttctctcggtcatagtccccgtctacaacgtagcgccctacctcgagcagtgcctcgactcgatcctcagccagtcctactcggcactggaggtgatcgtcgtcgatgacggctctaccgatggtagtggggcgatctgtgatacctatgccgagcgtgatgctcgtattcgcctcatccatcaggcgaatgctgggctctccgcagcgcgcaatgctgctatggacgtgatgcgtggggacttcttcgtctgcgtggactctgacgactggttgcccgaggatgccctggagcagccgatgaacgtcctgtcggcgaacccgctcattgatatcctcgagctcggctataccgagatcaactgccgcacgggcgctgagcgcctggtgctggctgctgggagggagctctcttcacaggaagccctccaaagcctcgcagccctctccggtgtcatggggatggcttgggggaagatcttccgcaccgctacgatgggggcactgcgcttcccagtggggcgcccctacgaagacaccccctttatctttgaggcacttacgcgtgctacacgctaccgctacctctcttggctcggctactgctaccgcgtggcccgagtggggagcatcaccgaggtctatgacaagcgccttgtctacctctttgagaatctcctggacctcgaggctcccattggggcgacctcgcccgaggccctgccgctcctgcatgagacgctctatcgtcgcctcttgatcttctcgctgtgggctatgcgccacgagaaggaggctcctgggcttctcgctgcccttcgcccctacacccgccgccttcggggccttcgttaccctgcggcaccccttggagagcgcttccgtcgtacgctcttcctcaccgcccctcgactcttcctcgctatgaagcgctatactcctgctcatagctaataaattctacatcactatggacgaacaactcatctatcgcatcgctgaagagtatatcctgctctataccccatcggccgaggctacccgcgaactcctccctaactacgagcccttcctggtgcccgagcttcccgatggctgtgaaccactctttaccttccgtgggggcgagagcctctcgtcagaccagcccaagaccctcctcgaagataagctctccgagggcgtacgtgcccgtgtgtacaagctcatcgatgggcagcgccgtctcgagatcgctacgcgccaaggctcccacgctattgaggtcgatcgtgactggaaggaggtgcgctcagatgtcttgctcgatgacccctcggcattcttcttcatcaaccgcctgatcatgatcgcctacggtgtggctatcgcacctaagcatatgctcaaggtccacgcttcggtcactgagctgaatggtcgtgccttgatcttcctcggtgtcagcggcacgggtaagagtacgcatagccgtctgtggcgtcagttcgtccctggtgcgcgtctcctcaatgacgatgagcccatcgtgcgtatcatggatgacggtgaagtgcgcgtctacggctgcccttggagcggaagcacaccttgctatcgcaatgcttcggcgcgagtcgttgccttcgtccatctctatcagagccccgagaacaagctcaccaagctccgtgggcgtgatagcttcgactcgatctactcctcctcggccttcctccactcggataaggtccgccatctggctaccttcgacactgtggccgacgtgctggagcgtgtacccgtttaccgcctcgactgccgtcctgacgaagctgcggtgcgcctgaccgaagcactcctcgctcaatccgcctcttagtatggggcactctccccagccgccatctatgcgtcgcgagctgctgatacacaacgagctcttcttcgccgagatccttagccgtatcgctgagggcaagcgccctcgtctcctgcctcgtggctcgagtatgcgccccttcatccgcgggggaaaggatcagatcgtcctctcacctctcaccgaagactcctatcaggtggggcgcgtcgtcctggcgcgcatcgcccgtggctatctggtgcaccgcatcgcgcgtatcgatggaggcgtcttcaccctacgtggcgacggcaatccctaccagcgtgagcagtgcacccaggaggagatcttggccgaagtgacggctgtccaccgtggcaagcaggtcatcgaagtcggggacaagctctggtggcgctatgagtacctctggcccgaaaacgatacgctccgccgcatagcactcgcactctaccgccgcacgctccttcgctggggctggtgatacgatcgcagtcggctacttgactgcttgccgataggctcctattacacgagagggcccgtagatgattcgctctacgggccctctttatgtcttcattcttagtgcctttgcgcaatggttccatatatagctatatgggtacgtgggtaaagctatatagctttgtgacgtgacctctattaggttgttgctctgcgtggggataaaagttgcggacgagtggtagatgagtttggactacgtacgtggctctaatatctacgtacgtggatatttggatttacgtacctggtcattaagactacgtgcgtagatagagaaaaaccactattcgtttggtatgcataccactactcgtttgtacccgataccactattggtctgacgccgtccgactattgctccacttcgctccctcgataagtctgctttgtacgccttcggatgaatgagggtaaagcgactggatactattgccttgaggggctcggctgggcgtattgtttggtggagaaaatcattacctttgaggatgaagtcgttgctcttccaaacgcaaggcttcacaccacgcagcacagactacgctaacctcgcaacaccgctccgtatgatgacctatcatactcctcgtcggcatcgcttgccgctccttggcctccttatactccttactgcgctacctctcgcggcacagcgtaagcgtcgggctaccgcccctcttccggctctccctgatacggtctatctgctggatcactatcaagagagccggcactggatgagagatcctgataagatcagccgcgctaaggctaagcataattataaggagatgattaatgctgggtgggagttcctcgctcctgcttggcgcggggtgcaggactctgcgagctatcccgccttccgctactactatgcttcgatggacgatgaattacggtcgagtaccaataagccgcgccttcttgctttctatgtgaaggaggagcctgtagagcgctcgcaggaatggcttcgtggtgtgaagtttaccccgatgaatcgcctcgataagctggtggactacgaggagagcgatctcagtcgtctgcctaagcaaatctacattgtgcgggtcacgggtggttctgtccagatgtactcggtgttccacacggagtgtagctggacaagtcggttgcatgcggcactccaatcgttggggtttagatttactcggattaaccccgaagggttgcattccgcaaccttctattcgtatgaagccccagggtcggagcgtggtccttcggtggctgcttgtgaagaagcctttgccgagagccgtcgcttgagggcgcataatcttactgtgccctggcttagctactatatatgctatgaagatgaggagtatcagaagctggataagtgtgatcctgcgtacataccgtctcctcccacggaagaggaatttgctgcgaatcgtaggcgaaatggcataacatctctccctgacacgatctatctcctcgaccactaccagcagagtctgcagtggcgtcgcatgtctctggatgagcgtctcgagagagaacgcaagcgtggtccgaaggagatgattaacgcagggtgggagttccttgctcccgcctggcgtggggtgcaggactcagcgagctatcccgctttccgctactactatgcttcgatggatgatgagtttcgctcaaaagtcaataagccgcgcctcctcgccttctatgtgaaggaggagcccgtggagcgttcgcaggagtggcttcgtggcgtgaagtttacctcgatgaatcgcctcgataagctggtgaatgactacacctatgacctcaggtgcctgcctaagcagatctatatcgtgcgggtgacaagcgagggcattcgggtctatcctgtgttccacacgcgctactgtctggcagatttcttgggtctttattacacggctccttctgacgccatcaaccccgaggctctgcatcccgtactcttgaatgcccgaggctatatcccttgtacggaggaggtgccctcggctgtgatagaggaggctctgaagcagggtcgccgcttgaagaagttgggcttggacctggagtggcttagctattgcacgcgcaaagacagtgggcgctatctaacagacctctccgagttcggggtaactacaaaggacgaggagtagggcagggagctatccctccatctcaggaaagaactactataactatggtacatattctcaatcaaaagggagcattactatgtgcccttctgatccttcttacggcactacctcttacggcacagcgtaagcgtcgggctacctcccctcttccagctctccccgatacggtctatctgctggaccacgatcaagagagccggcactggatgcgcgatcctgataagatcagccgcgctaaggctaagcataattataaggagatgattaacgctgggtgggagttcctcgctcccgcttggcgcggtgtgcaggactctgcgagttatcccgccttccgctactactatgcttcgatggctgatgaactacggtcgcctgccaacaagtcccgccttcttgccttctatgtgaaggaggagccgatggagcgttcgcaagagtggcttcgcggagtgaagtttacctcgatgaagctcctcgacaagctggtgagtgactacacctatgacctcaggtgtctacccaagcagatctatatcgtgcgggtgacgagcgagggcattcgggtctatccagtgttccacacacgctactgtcagttaaatgtctttggtctctactatacggctcctcgtgatgccatcaaccccgaggccctgcaccccgtgctcttgaatgcccgtggctatatcccttgtacggaggatgtgccctcggccgtgagtgaggaggccttggagcagagtcgtcgcttgaagaagttgggcctacatctggagtggctttcctatcgtacgagcaaagaaggtgggcgctatgcagtagactccgattgaggaggaacgatggagaaaaaggagtaggatactactccgtgccttataggatcatctactgaatccccatcatcggagcgcatagtatgtgcttcgctaatggcttttagcccctgctggggcagtgacttagacgcaagtccgtgcgctggatacctgcgcgcacgagacttgcgttattctttatacctttgcgacttagagttatagtgcagagtaggctttagagtaagacgctccgcatagctccgatgatccgagcaagtatctttcgctccatatatatagaagcaatgagacgtatcactacccttgtccccgcagctctgggccttctggcactcacgctcggtacgacaagctgtaagaccaagcaggtagagctggaggacttccagatctacgacaaccagatcacggccttcgccctctcgaccgatgaggctacgctgaaggaagctgtgtctgctatccccttcgtcatccgcaatacggctactggggcgatctacaatactcaggcgctcccctatagcagtgccgactacaatgtgcacctgcgcctggcgaaggctgccagcaatgcgaccgtagaggtcatcctcgctgacggcacgaccgtagcgtggaaggatgctacgcagaccttcaagagcagcgaccttctgaggggtatccagctgcgtatcacgacggctggtagtggcacctcgacgaacacctatacctataaggtgaccttcaagcgctatcagcaggatccccatgctttcgcttggtcagaggcctccgtgacgggacttcccgccttcacctccaccttctcacaggtcgagctctcgggcaatagtggtgcgctctactacgtcaaggctgacgggacgaatgcggtgagcagcttcactactcctacgggggcttggacgacctccagcctcacgggcctcggctcgggtgagcgcctcagctcgctccttacctatggaggcaagctctacgctacgacgagcggctcgcgcctctatgaggcttcggcactcggtacggcattcacagcaaagaccttccccacgacggctacgcctcagacgctcctcggcgggctctctgtcgatggtaagcccaccctcgctctcgtagggaagactgcggcaggtgcgacgaccttccttggctacaacatatctgctggtacgatctccacgatcggagagacgcccagctcctccttccccacggctggaagtacgctgagctatgagctcaccggtagcagctatgacggcgctgccctctatgtgtcgggtggccgtacggctgacggcaaggcaagccccaacctctgggcgacgaccaacggtaccgcttggctcatcgtcggtggtaaggctcaggctggtgtcagcgcagtctcacagagtcaggcttacgtcgagtcgcagaagcgtatctatcgcttcgtctcgacggcatcgacgctggagctctacatctcggatgaccgcggtgctacgtggcaggaggctcgtacggtagccttcacggggctgacccgcacggacttcgctggttatcccctcgtcgccttcccttcatcggatggcgagacggtctacctcctgcgtggggctaagaccgcaggagagtctgcgaagctcttcgtcgggaagttcggtggtctgaagactgtcaccgaatagtcccaccccgcccctcggccgtatgctccgcccgcttggcttagtcctcctcttggtaggcctcacggctcgcctcacggcgcaggactatcgctacgaactcggagggagcgtctcctcaagctactatctcggggatatcggacgtcggggactcatagcaccacaagcgccggggatagcgttagagcttagacgccctgtgtcgctgcgctgggcgcttatgggggagcttgccctaagagggctacgtggtaaggcggactatgccgctgatgccttcccctcatcggccgtagggagccgtgagtttcatcgcaccctgctggatttggctctcggaggagagttcaacttcttcccctacagcgcacgcgagcgctacctcggcacacgctcttggacgcccttcctcggggcaggtctggggctcgcaggtgggatgagtgatcgtcgcctacagctcttgccgggtgtgtatgcccgtctcggcctgaagctccgcctcagcacgcgctgggggctcacggcaagctggtcgctgcgccgcacgttctccgaccgactggaggggctggagccttcggtaagctggatggctgacccctttggactcgatggaggtcgtagcctcaagggccatgatagctacggctactggtccgttggggtgcactacagcctctcgccacagcggcggtacagctgtgactaaaagatatagctatatttgtatcaggttaggggcatagtctctggcctaataagacgataagaataacgtgtcaacgacaatgtccccccagtcatccgcgcccaccacggagctccgtatcccagagcacgtggctatcatcatggatgggaacggccgctgggccaagcagcgtggactgccccgtaccgacgggcacatccgtggtcaggacgctctgagagcgaccctacgcgctgcagcggagttcggtatccgctatctgacggtctacgccttcagtacggagaactggtcccgccctcaggaggaggtcgatgccctgatgagcctgctcgtctcggcgattcactccgagaccccaagtctcatcgaggaaggggtgcgtctggaggccattggcaatcttagtcgtctacccgaggccgctcagcaggccctccgcgagagtatccaggcgacggctgcctgtgagcgcatcacgctcatcgtggccctcagctattcctcgcgcgacgagatcctgcgtgccaccacccagatagcccgtgaggtcgccgaaggtcgcctctcggcagacagccttaccgaggagaccatctccgctcacctcgacacggctgccttccctgatcccgacctcctgatccgtacgggcggcgaggagcgtatcagcaactacctgctttggcaggccgcctatgccgagctcttcttctcctcggtctactggcccgacttcggccgtgaggccctgcgtgaagcccttgaggcttacacggcacgtgagcgccgctttggcaagacaagcgaacaaatacaactggaggattagccttcgctaaggccactccagcacgacgataataagatcctatgcagagaatccccgcactcctactccttgccgcactcctgtcggcaggtgcagtggaagccgcaccccataccgcccctcagctggccgctgacacgacgaagaccacttcgtcggtcgtcatcgcgccctccatcagctacgagcgccccgtgacgaagaccatcgctgaggtcaagatcacgggctcgacgagctatgatgacttcgtcctgagcagcctctctggcctcaacgtgggggacgagatccagatcccaggggccgcactgacctctgcggtgaaccgcttcctccagtcgggttacttctccaatgtccgtgtcctcatcaataagtacgagggggataaggtcttcctggagatcgccctgaccgagcgtccacgtctctctgaggctaccttcacgggcgtctctaagggggatcgtgaggagctcgagaagcgcacgggcctgaagaagggggcactcatctctcccaacaccctcgaccgtgcccgccagctcgtcaagaagtactacgatgagaagggcttccgtgacatgaagatgacgatacgtgagaccgaggctcctggccagcctggctatgtgaacctcaccctcgacatcgaccgtagcggtaagaccaaggtgcgtgacatttacttcgaggggaatcactccctcacggactaccagctgcgtatggcgatggggaagacgaacgaaggcttcgcactctcgcgtggccgtggtctgtcttcgctgctgaagatcttcaagcaaaagaagttcgtcgacgcagactacaaggaggacttgcagaacctcatcaagcgctaccaggctgcgggctatcgtgacgccgagctggtgagcgatagtatcgtacccgtcccaggtacccgtaaggtagacatctacctcaaggtcaacgaagggcagaagtactatatcaaggatatccgcttcgtcgggaacacgaagtacccctccgagctgctctcgcagcttctggctatccgcccaggggatgtctacgaccagaagcgcctcgagaaccgtctctccgtagatgaggatgctgtcagcaacctctactataataatggctatatcttcgctggtgtcgatcccgtggagactaacatcgtgggcgactctgtctccctcgaagtgcgcgtcaccgaagggcctcaggcgaccatcgataaggtgaagatccgcggtaatgacatcgtctatgaagatgtcgtgcgccgtgagctctacacgaagcctggtgtgctcttcagtaaggaggaccttatgaactccttccgtatcctcaaccagctcggtcacttcgacgcggagaagtccgtgcctaagcccgtgcccaatcctcagagcggtacggtggacatcgagtacgacctcacgcctaagagcaatgaccagctgaacctctctatcggttggagccagacgggtatcatcgggtcgatcggctttaccttcacgaacttctcgatccagaacctcttccgccccagcatgtacaaggggatcatccctcagggggacggtcagaagctctcgatcaacggtcagacgaatgcccgctactacaatcagatcagcgtctccttcagtgacccttggtttggtggtaagcgcccgaacctcctctcggtaagtgccttctactcacgtatgacggctatcaaccagcgctactattcaggtcaggctcgcaactactacggcgcgggctactacaatccctattatagtggctacggctatggtggctatggcaattactacgatcagacgcgtcaggctcagagctcgctctacgaagactcctacgactcggataagttgctcagcatcctcggtctgaccatcgcaaatggtcgccgtctgaactggcccgacaactggttccagctcacagcgtcgctgaacttcacccactaccgactcaataactggacgtacaacaccttccagaactaccaccagggctcggctaatgacctcaacctggagctccgtatcgaccgcaactccgtggacaaccccgtctacacgcgtcgtggctcggacttctccttctcggtcagcttcacgcctccctactcgctcttcgataagaaggactactccgatccgtctcttcccctctcggatagataccgcttcctggagtatcacaagtggaagtactctggtaaggtcttcctgccgcttatgaaccccacgactgtcaagcgtactcctgtcttgatggcacgcgtcgagggcggtatcatcaatagctacaacaagtacaagcgctcgcccttcggtgcctattatatgggtggtgatatgatgtctggctctatgggcaactatatgaacgagaccatcgggctgcgcgggtataagaacggctccatcgctggggctaactacgactacgcctactcgtatatgaaggcttcgctcgagctccgctatccgctgatcttcgagcagtcgactaccgtttgggtcctcggctttgctgaggcagggaatgcttggtcggatatcagccgctacaatcccttcgacctcaagcgctcggctggtgtcggtgtgcgcgtcatgatgcctatgatcgggctcctcgggcttgactggggctatggcttcgaccgacccaatggctacaatgagcgtggcggtagcaacatccactttgtcctcgggcgtgacctgtagtggcataagtcaaggcctcggtgcgtagagcctacgcgccgaggtgatgtctcacactaaatcctaagattgcagtatgaagaagattcttttccttctggccctgctcctgctccctctcggagctgccgaggcccagaagatcgcactcgtcgatatggagtacatcctcaagaaagacccctcgtatgcggtgatgaaccgccagatcgaagacctgtcgaagaagtggcaggctgaggtcgctggctacgagaagaaagccgagcaggcctaccagtcttatcagagcgaggctgctctgctctctgcccagcagaagaagcagcgcgaagagtctatcgtggcgctcgagaagcaggcctatgagctcaagcgtaagtacttcggtcccgaaggggagctcttcaagaagcgcgagtcgctgatgaagcccattcaggatcgcgtatgggccgctatgaaggagctcgctcgtcgcggtggcctccagctcatcatcgaccgctcctcctctaagatcgtctacgctgacccaggtctggatatcagcgaagcagtcgtctcgaccctcggtcttgaccgatagtaatagtcaaatcaactaattaaacgtaataacccaagacaatgaagaagttcctcatttccctcctcctgatgctccctctggcattctcggctaacgctcagcagaagatcggtgtcgtcaataccgctgccatcatggaagccctgcccgatgtcaaggctgctaccacgaagatccaggatctcgctaagcagtacgactctgagatcaagcgtatgcaggatgagctgaaggtgaagctcgaagcttatcagaaggaagaagcctctatgaccgacgtcatcaagaagcgccgtcagcaggagctccaggagatggagtctcgcacgcagaatagctatcagatgatgcaggaagagatccagaaggagcaggaaaagctcatggctcctatccgcacgaaggtcaccacggctatcaacaaggtttgtgaagccaacggctgcgcttacatctttgagtcgggtgccctcctcgctatgggaagcagcgctctcgacctgacgcaggctgtcaaggatgcgctcggcatcaaggctacggctgcagctgctgccgctcctaaggctacgggccgcaagtaatcagcgtcgtcgctgagcgctccagcgcttcagtgatagacaagtaataagccccaggcactcgcgatgagtgtctggggcttgctctttgtgtggggtgggggagaaggcgtgcagtgcaggagtgcgccctcacgtggggataaaaagtgagcgacgatcgcctctcggtgatcgccgctcttgcagattgattcacatcattggatgttccttaggtgggcccaataggattcgaacctatgaccccctgcttgtaaggcaggtgctctaaaccagctgagctataggccctaagtgctgtgcgtgaggtgtgctccttcccgatccccagcggtgtgggcccaataggattcgaacctatgaccccctgcttgtaaggcaggtgctctaaaccagctgagctataggcccgcttggggtttaggaggacggagctgtcctttttgctcggcaaagttatgaattatttttgatagagccaagtccctcgtttcgccgcgctatgaagtgcgccttcatcgcagcgctgcttggcagggtgcaaggcattttcctcccctggtttgctggctcctatcgtggcagtagagggggctgtgatacagctgcctataagcctttgctcggtgtaggggagcgaattcgtataaggagggatgagtaaccagtactggttagcgtcgtgaccagtagtggtcagcgttgcgaccagtactggttgatataggtgaccagtactgctccgatcggtgatcagtactggtcacttttcatccctcacgaaggtgtgctcctggcgggtgtgaggagaggagggagctgtgtgcaggaggtgcgtccctctctgtctgagaagggggcggtctgatggacagggggggcaaggagtggtgctatgatattggttttcattatatttgtgcgaatattcgccatgggaggagttcgtgcccttcgagcactccgccattgcctctaagccgtgtcgttcacctttgcatgggcatcaccagcgcacctccctattgttttaatctcattgtgatgtatgaatacacccacgagcaagcttcactacgaagccccgtcggccgactgctttaagctgagctctccgccattggacctctgcatacagttctcgggtgacgccgacttcgaagactttgaggaaggggatcccctttagtagccccccttctccaggcgtgcgacaggtgcgcctgattgatgactagccccctttgcctcgggataacccgggcgaagggggctagtcaattgttagaatgtgtgtatctttttatcattctatagatagaaataattgctcagatacccgactttgattatctttgcgtccggttaatttacaagatgtatcctctccatggtcctcgaggcaccgcttttgtgattgaaatggtgctatttatctgggcacttggaggcttaaggagccactctttgattgaaagaatataattatagttatgaatagaatcgattcaaagcttcagtatgaagcacccgctgctgaggaatttgagctcagctctgctcccgtgaatatctgcatccagttctctggtgacgcagatttcgaagacttcgaagaaggagaagccctctaagggccctcttttcctcgatggataaaagcagcgaaggcacgataagttagctctcatcgcagagcccttcagatattgaggcgctgcagagtcatccgactctgcagcgtctcgtttttacactttgctcttggtgatggtgggcttttcttgggaggtatatggctgatctgtaatatgtatgtggggtgttgaggtgctggaaggtgcgtatataaaagggcttctgaaagaattttattaatagtcgtgtgaataattgttcatgtataacgctttgattatctttgcaacgcaattacaagggagggtatttcctcattggcactttggtgtcgcgctcttgccttttaagcgctgccatttatccaagcacaagagagttttagggctctctcccttccgcccaaacagtattaatttatagtatgaatagaattgacttcaagcttccctacgaagcgcctatcgctgaaagcttcacgctcagcgctgctcctatgaatatctgtgtccagttctcaggtgatgcagatttcgaagactttgaagaaggcgaagctctctaagctcctcttctcagagtccctctattatttctactccggaacattaacaagaattcaatgaagcttaatttactcaagtgctctgccctcctttgcgggctcttcctcctcggctcttgcgcccaggaagccccccaggcagacaacaagacgcagctcgaagacggccctcgcgtagccgtacccatcgagctcgaggtatccgttgatgcctttgatgcccccaagtcccttgatcaggaagcgcgcgcctatacaggcgtcaagacccctatcacggtcaaggatggtagcaagaaggaactcaatgacgacctctccgactcctctgtagctcagaaggtgcttacgcgctcacgtgctaagttcatcgagaagaatcctaccctcgacgctgtcgtcaagattgacgttaagccagcgggctccgctaccaagacctatatcggtcaggctaagatggaatacagtcctacgaaggataagtacacctttggtggtgatatcgaaatccctcaggcggtggtcactcaggcgcaggcctctggtgcgacgaccactatcacgctctatgcgggtggtgagtacgatgaggcgaataagaccttcaagctctcgtctgtaatggaagaggtgagcctcagggatcttgccacgactcctatcgagctgcctatcctctataagtctgagcccgttgccttcaaggtggtgaacggtgctcttaagcctgacaatagctcgtctgtcgggacgctcaagccccttggctcgctcctcctggtgaccttccgcaacaacatgcagcagacggttaccttcgatgggatcaccgcggtgtccaactccttcttcgggcctaacaacgaaaataagaccgtatcctatagtatcgagagtggtgccttctccaatacggttggctataagagctcctatgtgaagtcttcgaatggtggctcagactacacgtacttcttcaaggacttctcttccagcttctctgtccccgctggtggcgcgcgctctgacaaggcatttgtcttctggggcttccatacgggggggagtacagcagtctcaccttctaacaagctgacggctgctaatggtagtgctatggaggccaacgcctttgctccctcgacctctgtcctgcacgtctacgggcagaacgtcaaggtgggtggtcagacgccttcacgtcctaactatagcatcgcgcctatcggtggagccaacctcacgcctgagagcggtaaggcctacacgctgaactgcgagttctacgagcagccccgtcagatgctgggctacttcgctaagggttatgtctacaaggaaaatgatgcgacgtggaaggactataacttcgatggtggtggctccaatgacccaagtctctatctgaagaagagtccaagtaatggtactggcttcaagaataaaggtaaggatgaccgcaagacgactgcagataacatcctccttgttaactctgctcaggctgctgaggcacgtgtcgcaaacggtggagtgacgactgctaaggggaagatgtacctacccaatgaagactggctcaacctcattggactgaatcgtcctctcgagtttgagaagcctaagaatgatctgcgctataaggagcttgcaggcttcacgccatcctatcgcggtcaggtagtcccagcacagcttccctacaaggatgatgcaagtgcatcgacccccttccagtctaagggcttcgtctatgcggactaccatgtcgcaagccagacgctaccagagaatggtcttggcaccgtctatcgccagctctatatggagccccgcaatagcaagggataccagcctcgcagtaagtaccagacgatcatgcgtgtcatgacgacgggtagcacgatctatgtcgaggatgatagtccccagcgaggtggcgataatatctatcccagtacgctgacgatggagtcgctctacgtcggtaagtacttcgtcggtaatgtcatgacagctcccctgtatgtcacacgtggtgcatcgcagcccttcctctatgccgaggatgggaatagcttctggcagaagcccgaggtcgttcgtgaccgtgtcgaccgcgcgctgctcaatgtccccaccttcgactacaatcagatcagcgaagaggagatactgctggacgcgggtaaggatgactttaagatcaagaccaaggctgcacctctgatgaatcactggtgtgatgctccgcagaacgtatggatggggaaggtccttggtcagagagactattatccactgattaacttaatgatcaatgattacttccccacagaccgagagcgaacgactaatcgtatctatggattcgctgatactaagggtggtatttgggtgatcacaccacgttccaagacctcaagcgagtacaagattgtcagtggtcgtctgcgtacctatacctatcaggtgcttcgcccctactctacgaagtatcagggtaacgacggcttccgtaacaacaacaactaagctctcttcgtagagtccctcttatcatcgaggcgctgccgagtcatccgactccgcagcgcctcgactgcttatatccatcgcctcagctatactggcccgaggtggactgatgctgtggtatgcttgacttcacgcccagatggatcatcctaagagtaggggtgtagagcctgcaagtctcaagggattgatgatgtgtgaatagttgcctgtatctgttgcttcaattacctttgctacacaagatacatacgtatgcgtaggctcagagccgtcatcgtgtgtatgccgagcagaggaagttactctgcttcgcaggtcgacaggctgcatacagccccttgctggtatctccccctttccctgactccctatccgcatatatgatctcctctcaataattaaatatcctatggacgaaattcccaagatcacatcggtgctcaccggaggagcgctacccgagggctacaatcccaaggtgatcgagaagctatccaagcgctttcagaagctcagtgaagcgcgcgtcatccggaactatcccattcgtcgcttctgctatgacgagagcttctacagcgtctatgccttccctatcaagggtaccgagatagcccaagaaacgctgcagcagatcaaggccactgttgccacgcttgattatggacctatgcgctacgactcgatgatgggtgcaggcccagactactggacgctggagccagagacggggaagcacaccaaggtatatgccaaggagccgacagccatctcgatgatcagcgatgccttcgatggggtcgtcatctacacgctccccgaatatggggtctcttacaaaaaggctgcactgcgccaggatatcccctatgtcgtctttgggaagaagggcgagcctgacgggttcaagctacagcccatcacgcaaagcgacctcggactccccgcctctgagatcacttatgagggccacaccccagacccagagtccccagaaagtgctcgctatcagttcatattcaaggtcatcatagcgattgtactcatctgctacctcatctatcgctacctactctaaggtactcgcctaatcggtagagcgactctatacaaactccacgtacaggtacgcctctccgacgatagccatatcgccagagggtcgtacctacttttttctcgtcccatacccctttccccgaaggggtggtgtgcacctatattggtcggcgggtgaacctatatatgggttattgctctgcatagggataaaagttgcggacgagtggtagaaaagttttggctacgtacgtagctctaatatctacgtacgtggatatttggattgacgtacctggtctttaagactacgtgcatagatagagaaaagccactacgtgaaggtgcttttttcttcacgagaaggacacttttccctccgcaggataagaggaatactcacgataaggcgaagggcttgtgtatcacttcggagaggcatatcccccagtgctggagagggatgagatgctgcggacagcgatttatcagatgatatatcgcatcattccgtgagagagagcggatcgggtaagagggcagatacctactgctcggtattttgctctggacgggggtaaaggcttgtatttcttcatccttctgcgtacgtttgcactacacaagcgagcgtaatccagcaccgaccagcgcccctatctgcggggcttcgtagtggtgctacccttcctcttctctcaccccttcctccctccccgcgaccagcttcgcagagagcctacgagtaacccttgattaaggaactttatctatatttgtagtggtcctacacgccgtagctccgctctaaaccaatcgagaacatgttacaggaattcaccctcaaccgtggtagagcgatcatcaactttacctcgaagtactgcgataaccgccgtaagatccttaccagctacgcctatagccgggtcgtcgaatccttcatcgcccacctacgcagagacaaccccgtcatctatgaggccttcatccagggcttccgcgatgaggacgagctgatacgtgacttcatggaggtcatccgcctactgagcgtctgcagcgtcgaagagatcctcgaggtaaacaataagtatgcccccttcttcaaggaccgtgacctcttcctcgaggtcgtcgagctcctctatcactactggcgccgtatggagcgcatcgccgtcgtccacaaccagcgtcagggagatggtgtgcagaacgtccgcttcgtccaggcttatgagctcttcaacgagctgatcctctcgatctaccgccgcacgaaggaggtcgtcaatggcttcgcaagtaaggtctaccgccagacgactgctggagccaacgctgggctcatcctcatggatgccccttggaactaccctatggagtataagggcctctcggcgatccccttcatcaactccatcgtcatcaaccctccctacgtcacctacacaaagaagaatacgcgcgacggcatcttccgcgagcatacgctgaatcccgtagcgaacatgatcctcaacgaggacgaatggttcctataccccgctaaggtcggtgacctcctggccttcgtctacttccacaaggacttcatgtgtcatggccttgggctggccaacctcttcgagctggcgcaggaagatgagtatatcggtaagaagccagatatgatctatatcttcggctatcccgatgggcacgaggagaagcgcaccttctactacaaggacaagaagaatgatatcctcatcggctacgccaactactgcgatgagatcgactacttcggatatatgaagaagatgctcctcacgctgcacaacctcaagcagatgagccgtggcaacctccccatccacggggctatggtcaatatcatcctgaagaatggccgtgaggcaaacatcatcatcatgggtgacagcggtgctgggaagagcgaaagcctcgaagccttccgcacgctcaacgagaagtacatccgccatatgcgcgtcatcttcgacgacatgggttacctccgtctcggcgatgacggcgtggtgcgtgcctacggtacggagatcggtgccttcgtccgcaccgacgacctcgatcctacctatgccttcagccagctggatcgcgggatctacacgaaccccgataaggtcaatgcccgcgtgaccatccccatctcgacgtacgagctgatctcaaagggcttccccgtcgactatttcctctacgccaataactacgaggatgtagagaagaagatctccctcttcagcgatatggaggaggctatcaaggtcttcgaagctggtgcacgccgcgccaaggggacgacgaccgagcaaggtctggtcacctcgtacttcgccaaccccttcggccctgtgcaggagccggagctggcaggtcagctgattcgccagttcttcgcctcactctttgagcaccacgtcaaggtcggggagatgcataccggtctggctgtcgaaggccactcaaagaccggtcctcgcgctgctgccgaagagctcttcagtatgatcaacgaggactaaggcgctccgccctacctcctaatacatacgcccccgcagaccgacgatgtgtctgcgggggcgtatgctttatcagtaggccaatgcggggagctcttcccgatggagacggtagccgaagaccgtgagggcaaggaggatataatagaggaggagtgcaccgagcgccagcggatagtggagcataagcgctgggatcccttcggcaagcacgacgccctcccgcatcagccctgcaccccattccagtggggcaaggagtccgctcggtgctgtcccgatgagagggagaaggaggaagataaggaggctcgtagggatgaggagcgccgagagtggtacgacaaggagcgtcgtccagaggaaggccagcgaactctcaccgaagagatagaggctcagcggtaggaggaggggctggacggcgagcgtcatcgcaaggagcgcccacagatagcgtaggaggggttggcgtagctcgccaagtagtccctcaatggggcggtagaagagacgtatgctgatgatcgcaagataggtcatgaggaagctcgcactgaagaggctcgtcggggcgtagaggagctgaaggagggcgggcagggtgaagacctcgaggaggcagacggggcgacgcaggaggcggaagccaagatacatcgtgagcatacccgcagcacggagggtagggatgctcgctcccgtgaggagggtgaaggcccatgcagcagcgaggagtagggcgcatcgcagtctgtctctccgccttacgtagggtatgtatcgtagaagtaaggtcagtgccccgatgacgacggctaagtggaagccactcacggctaagagatgcgctacaccgccccgcacgaagctcgcactgacttccctaccgagtgcatcgtgacgcttctcaccgagtgccatcgcgatgaggagatgctgggcataggggctgagtgcgctcgctcggatatgtgcggtaagtccatctcggagcctgcgggcatagcgtgtaggggcgtggagaaggagcgtactgctgggtgtcggctggtgggcgaggatgtgggcacggccaagggcagtcacgccttcgctcaggaggtagcgggcatagccctcccgctcggcgggtagctcacggacatagcttagcctgtcaagactgagggtaagggtatcgcccacccgaatagacacgctgtcagggcgcctgcaggtgagctggaggagcgcggtgaggatattgccttcggctaaaaggcggatgcgcaggcggagcgtggtgtcctggacttcctcctcttcggtgaggacggcgcgcagggacgtgtggagtggtagcctcacctcggtgatcgcctcgacgctgtgagcgtagtagaggcgtgctatgagaagcagtaggagcgtgagcccgagacggagcgcacgggtgcgccctacttgcgctacatagtggctgaggcgtgtgccttcggcgaaggagacgagcgccccataaaggaaagctcctcccccacagagggccaagccgaggctcagcgctctatgggggaggagctctgtggagagatagccgaggaggaggataccgagggcgagggtggtgtagctacggctcacggccgtgaccaccgaggcgacgagtccccgctcgtagcttagacgaagcctatggacgagagagtgccttgaggctacggatagcggccttggggtcttcatgcgagaagacatagctccctgccacgaggacgtcggcgccagcctctacgagggcggcacccgtcgaggcgttcactccgccgtcgacttcgatgagggtagagagtccgcgctcatcgatcatacgacgcaggcgctggaccttgtcgatcgtctgagggatgaacttctgaccgccgaagccggggttgacactcatcaggaggaccatatcgaggtcagcgagcacgtcgacgaggagctctacaggtacgtgaggattgagggtcactgcggccttcatccctgcgtccttgatcgcgccgatggagcggtgcaggtgtgggctgacttcgtagtggacgttcatcgtatcgaccttcagagctgccagctcgcggacgaacttcatcggctctacgatcatcagatgcacatccagcggcttctcaatgatggggcggatggcctcaaggatggggaacccgaaggaaatattgggcacgaagacgccatccatgacgtcgatgtggagccagtcggcctcgctctggttgatgaggcgcacgtcatcctctaggcgaaggaagttcgccgagaggagcgaaggcgatacgatcgcctgcttcttgctcatgagtctggagtgaaaggggggggtgagggaagggaggtggtttagaagagcgcagctaagaggcgcagctgacgaagcgtctcttggtgccgaggctgtgtgcgctcgaagactgtacgggcaataagattgagtttttctttgtcagtacgggggtaggcttgttgcataagcagtttgggataatgaatgaataatggatgccctggggtaacaccacgctggagcgtaccccagggcatagatataacgtagtgtcctcgaggtctattatcccccgatggacgtctgagagagttacttgaggagctccttgataccgccgagcgaggagagtacgccggaggcttcgtaggggaggtagacggtcttgttgtcctgcccagaggtcatctccttgagggtctcgaggtagcggacagcgatgaggtactgggcggggttggcacctgagccttcgacagcttgagcgatcttgcggatggcctgagcttcggcttcggcagtgaggagcttggcttcggcctcggccttagcgtggagcacctgagcttggcgttccccttctgcgtggttgatcgcctgctgcatacgcccttcggactcgcggattgtggcttccttctgcccttcggcattgaggatctgtgcgcgcttgtcacgctcggcacgcatctgcttctccatggcgtcacggatgtcgcggggagggttgatatcctgcagctcgacgcggttgaccttcacaccccacttgttcgtagcctcgtcgaggatgatgcggagcttgttgttgatcgtgtcgcggctggtgagcgtctcgtccaggtccatttccccgatgatgttacgcaggctcgtctgggtgagcttctcgatagcgtcggggaggttctggatctcatacatcgcacgcatggggtctacgatctggaagtagaggatcgcgttgatctcggtgacgacgttatccttcgtgatgacgctctggcgggggaagtcatagacggtctcacgcaggtcgatattcgtgatctcggtgaagcgcacgagggtctgcccgttggctcctggcagcgtgtagcgccagcgcataggacgtggacggtcgatgaaggggatgatgatgttcaccccagaggacagcgtgcggtagtagcggccgagtcgctcgatgatgaccgtctgagactgctggacgatgcacagcccctggtagatggtgacgatagccaggacaccgatgacgatggggataatgaactcaataggcatggtagaggagagaatgaaggtgattattgaataggctcgacctgaaggacgaggctggtatagccagtgatacggacttcgctccctgcggggaggtcgtgggcgacggaggagatagcgcgccagctatcgccgtcgacagcgacgcggccaccaccatcacctaccttgatggcttcgctcacgaaggccttgcggccgatgagggcatccatacccgtcttggtgtcgcgggcagcgaaccagcgtgccatcaggggcttcagaagccacagggcaaggaggctaccgacgccgaagaagatcgcttggatgagccagcttccgccgaagagcgctgggataatagccagaagggcccccacgccaaagcaggccaagatgaagcctggcgtgatgacctcaagggcgaagagtatgagtgcggcgacgagccacagctgccatactggaaggagggagatgaattcgggcataatcgattcggtccttagtaagagaggtgttgtagcaaagttagccaaacttccctactattcctacttgctccagacgaatcaatacacctctgttgattcatcctcggggtagtttctaggcttacagtcctcatttcggaaaagggattcccgtcccttgggttcaatatgattaaagcgaaaccctacaaccacaggatcttcgtcttcattataaaactgagccctatccttattctcgatccacctcttgagaaattcctgaaactccttaatcactggtgatgaatcaccatcttgccgattgatgaagtcgcaaaaggactcgttctcaaaggtctcgtcggggtatataccccagataggttcaggtaagagaagcgtatagacgttcttttggggagggcggagtggagctatgtatggagctatgaagtaagggattaccgcctctaagttctcttggatagcctgtttcatctccttatccatttcggggtgacgtaccacgggtttcagttgcgattccccccatctattctgtagccccgtgggttcaaaggttcgacactcacgccacaagatataacagaatccaggatgggtggatttgttttctctgaggtactttaagaatagttcttctttagtagcattaagttctgctgaagaaaaatagagtgcccctttatcctctcctgtatatcgatcttgttcgggtggctcgctatatcgaatggccattatgagatagagaagaacgccaagtcggatatctggccttgcaaaaatttccttctgtttctctttcctctccccttctggcatgtatttattgagcgcatgtatagcatcgtcaatatctattcttgtaacgagtgccaaacttttagacgctatataaaagagtgtagatagaatcttttcccccttctccttggaatcaatattcacttgtttgaccttgcgatataagctctgctcctgcatttgattaaactttagatcagcatatcgcagaaccttctcaatagattgagatatacctatctgaaactcatgatcatcaatctcgacggcgcgtaaagtcccgtagaagtatattcctatgtagtcgccatgattagcctgtcgtggctttgcatctcgatctcctccccaaagagttactagaagctccataactaaaccaacatgcttgatctgaagatccttatgatgttcagagatgtacttgctaaaattaattctatctccatatattggatgatctgatagcgcctcttgcatccagctacttttatctccctttgagtcatttgtcctaattgctcgtttgttctctagaatatcaaacactcggctataattctctcttaagaagtcaaataatctaggatattggatacgtatcagttcgataatgaaccagtcgaagagagcaacattgctctctagctccttacgacgtgatgatagggtattgcagatccgcttaattactcggagagtggggagatggtggctaagctgcaaccccgagtttttaatatctctccagaggtcaccatatccaattctcttaagctctagtctaagagcctcctctagttgctcgggagtaatcttcgctaggggatattcctcctgcaggatcttctccatgtagcggtaggtatgtgcgtcgaacttgttttggagctgggaggcaacatactccttatcataagttaggatatagctcatgttagggaaggataaagagctattccgtatcaagctaaagagttcgattagctcttctccatcaaggcggtctacatcatcgatgaagatcattatcttcctcccgagcttaccgatctctttcttcaagaactcgtactgctcacttgtactctttgctttgaagccttgaggtaagagacgcgctccaagctgtatccaagcactgtcatccttatctaagatatgatctacatagcgtgtgaagcctgaggctaatgctgagttgtagggggctaacgtacggctgagttcctcgaagaagatctgtgtcagattgggggccttgcggtacatccaagggttgaactctatgaggattatctcactgcagtggttatctctaaggtactgctgcatagcaagcatgaaagaggtcttccctgctccccaaggtgcagtgagccccagcgtaaatgcagcctttgaagtatctgtatggaagatcttctctgttaaattctctgcttcctttcttcgccctaacagatcgttatccttatatgtgcaagggtattcgacttcaaatccacgtatagagttatccactccctcttgcttgggttttgtgcgatgccgatgcgaccaccacactacaactgccatacagcccccgcagaaaggaaggaggtctacgtagcatatgccaggtatttgagttggagtagctacgtagtctgcgactccaataaaacgatagtatgcccagcccacaagtaggacgacagtcccaaagagcacgcctttactaatgacatccttttgcttgggttttgtgcgcttccaatgtgaccaccccataaccaatgccacacagctccccaagataggaaggaggtctacatagcaaacccctggtatgggggttggagtagctacgtagtcttcgactccaataaaccgatagtatgcccagcccagaaataggaaggcagtccaagcacgcacgccttcactaatgacatatctcctccgacaaaggacataggtataggttagtgcagtcacaattatcccacaccatacgatgaagctcccccagctgggcgcaaaagactgtaggagtgctacgaacttactctcaaaggtgggatgaaagaagatgtagaggataactaaggcaaggagtcgccaccgtcgctgtaggtaggcaaatagcctgtctatgacttggttaatctttgtttttggggagtaagagggcgtagagtttgagtccataggcatgggatttatccgctggaggggcgggcgatgaggggtattatgtggggtaaaattagcgaataatcagctttctggatataggtgaagcttctttgctttcgcggaggaggagggggaaggaagggcggtcgggaggcgaaaatggagggtgtgtaagtgcttattgtagagcgaggtgggaggaggcgtggaggagggggattgcgaccagtactggtcagcgatcgaaccagtactagtcacccataggaagcagtactggtcaccgcgcgaagtagtactggtcagacgagtgaccagtactggttgattttgggtgggcgcaggccttccgcctcgcaccgtgaggggagcggggaagaggtgtggggaaaaggtgggggattattcgccgaggaaggcgcggtagtcggcgagggtctcgcgggtgaggagggggcggttggtcgtgctgaggggaaggaggagcgagccttcggggagggcgggaaggagccccgtcgcagaggtagcgcgctcacggaaggtcttgaggtcgctcgctgtggggaagccttcgataaggtagcccttgagccccgtctccgtggggagcgggctgacctggagcgtccactgcgtgaagtgcgaatagacgaaactcatcagcgcgaagtacacctcgtggcgcggtaggctcccctcggggtagaggagcacgaggctgacgacttctcccgctgcggttggggcgaaggtcgtggcaggcccttcggtctcgcttatcccctcggtgctacccgtcacggggtgagtgaggaggggcggagtggtgagggggcgccccgcacgtagggcggcgagcaggctcgaagcgtagggcatcagcggggtctcgggatagcgctggacgaagtcctccaggcgcttgcgtagctgggcctcttgtcctgcctgcacctcggtgagggcggtgaggaggagtgccttcgggcgcaggtcttcgtcgtggtaggggagggcatccagctcggtgaggtactcgtgtgcgcggctgacatcgcccgtgcggtaggccttgtaggcggcatcatacagctcggtggagcggttggcaagcctttggagggagtgtctgagctcgggcgaatggaggagcttcgcacggggagagttggggaagagacgtaggtattccctgcgtaaggcttcggcttcggcatcacgcccctgtcggagggcgaggaggatctgacggtaggcgacttcttctcgttcggcgaagtgggggaagtccctaaggaggcgcgtgtagagggcacccacctcatcgaggcgctggagcgggtcgtcgaggacggatgccatatggaagagggcgctggcgagggtgtccgtcagcgcttcgcgtgccttgggggtgaggggaagggcacggaggtaggcttcacggcttcggcctctatcgggtgaagtggcatcggaggcgcctgcctcctcgggagtggttggggctacgggcgcggcatcgagggcgcgcagactgcggttccagtcgtcggtgagcggacgactcccccagcgctggcggaaggcgatacggccgagagcgatctgctgagggtcgtcgaagtagaagcccgcggaggtgcttcgtggggtcgtggtcggttcgtcgaagggcgagcgagcggcatcaccgagatcgtgcaccttctcctccgaggcttcggcacgagcgatgaggctatcgatgtggcgctccagctggtcggtggggagagcggcaaggcgaaggaggctgtcggcacgatgggcggtgcgtgcgtgaggggcgaggaggcgaagtccgggtaggagtcgctccaccgtagcgtagtgggggtgctggcgctggatgagggggaaggccttctcgagggcttcggcggactctatgtagcgctggtcttcgagcgccagcaggcctaagcgggtgtaggcttcggcagcagcgcctcgcaaggtctgtgccgagtcgatgctctgacggagggcggtgcgggcggcttcgcgctggtcggaggccaggagcgcttcggccagagcgaggtagatggcggagcggtggggggcgtagcggcgtagacgtgccagacgctgcaggcgatggatgcccgcctcgctctcggtagtgagcgcaagagtgcggagctgggcggcgagctcaagggcgggctgggggcttgtgcgctccgcacgggcaaaagccgcctttgcggcctcgcgtgcgccctgagcctcgaggatctgtccgatgaggaaggagaggcgggcacgctgtagggcggtcttctccgagtgagcgagggcggtgaggtgtgtgagagcggtggagtcttctccacgggcaagggcaagttcggccgctgcggtatggtagagtaggggtgcttggcggaggacttctccctcacgacgggtggcttgctgtagctcctcctcggcatcgaagagctcgccacgcagggtgtagagacggcagaggtagaggcgggcgatgtcgccgacctcaggctcggtagcgtagcgtcggaggatgtcggtgagggtggtgtgtgctgcggggaggtcgccgccatagagctgactgcgggcgatgaggagccacgcctcggcgagggcgggattgtactcggtcttctcctgcatacgcacggcacgagggtcttgcctccagtgggcagggcgagcgggcttgcgggagatgctatgctcttcgatggccttggtggccttctctatggtgcgggtgaagcggggagcagcgccgggtgtcgtggcgcgagcgagtacgggatcgactggcagacggagcgtgtagtcgtcggtcgtgccatcgagtgcggtctggtaggtggtctggtacgcctcgcgagcattgtagaggacgttgtagcgcgtgacgaaggcctgccacgtgcgggagctcgcggtattcacgcgtcgggagcaggccccgaggagcgcaaggagaaggagaagggagccgagtgcgcgggggcttagcctcgggcgtgctgggctctgcgtcgtgtgatggcgctgagacatttgccgagggcaaggaagaggaagagcaggaggatgatcagcacacccgaggggacgctgatgaggtaatagcttaggagcaggccgccgacgttggcgatgaggcagaggacgatggagccgcagatgatcttgcggaagtccgccgtgaagagcccgatagtcgtctggggaagggtcaggagggagaggaggagcatgatacccaccgagcggatcgtcagcacgaggctcacggccacgaggatgagtagtccacgctcccacagcccgacattcatgccacgcacacgggcgaagtctcggtcgaaggcggtatagagtatctgtcggtagccgacgctgaagagtgctatcaagagtacggcaaggagggcgagcgcgatgaggtcgcccgccgtgacgagcaggatattgccgaagagataggcggggaggctggtggcgtagccaggggtgagggtcatgaagagcacgccgagggccatgccgagtgcccagatgctggcgatggcagagtcctcacggatgccttcggtacggctgagcttgccgatagagaaggcggcgaggatggctgcacccgcagcagagaggatgggattgatgccgaggtagatgccgagccctatcccaccgaaggaggcgtgcgtgataccgccactgacgaagacgatgcgtcgcacgacgatatatgcgcccacgataccgcagacgatggcggtaaggagggacgccgcaagggcgttttggaagaactgataggcgaagatactcggcatagtgtcgaggtcggtgcgctggggacttaggctgcggggctgggctcgtgacggccgacgatggcgtggtagtcgcggttctccccgacgatgaggtagagctcggggcggagcgtctcggggaactcaacgccacgcagctggaggctacgcacccaggcgggtacttcgtcggcatcgagcgtgaggaggacgtcgcggaactcctcgacttcgctctccttgtaggcgctggcactgcgacccttgaagcggtccagctcctcgtcatcaaagtactcaatgcgctggctgacggcagccagcaggctatcggtctcgcaggtcaggtggttgccgcagcagccctctccgtggggtagctcctgaggctcaggctcgatgacctcgccacgggcgatgcgtcgggccttgaggtacgactgtatggtggctgcgagagcagcgatggcgccgaggacggcgagagcgatgactatgacgaggatacttcccatttgagagctaaatcaaatctatttgtgagtaaactatgcttaagcataagtatatctatgcaaagatagttcattcgtgaggactgagcctccgtggggaggggtggtatgaacctatatgggtcggtgggctgacctatatagaatcacgctgcgacctatataggtcgtcgtcacgaccaatataggtcagcccgctgaccaatatagatcgcagaatcgtcgtcacgccaatgcgtactccataggcgatgagagcttggcgtgaagccctgtagatgggggctatactcctatgggagagaaagagagcggggcggagcaactgagtcgttgccccgccccgctgcggtatcgagtgtagtcggctacgcgcttagaacatatactgcacgcggagctgcagtgcgttgaccttcttcgtgtcagcctgcccccactgcttgacctgcatgtggtggtagttcagacgcagtgcgacgtacttattccagtagtaggagagcccagcgctgtagtcggtcatcttacctgcacctgccatacctgcgatgtttgagttcgtcagcgcattgttgtcggtgaggtcgaggaagccgtagccgagcatcagctcgaggttgccagagttaggagagtcgacccccgaggtgacgtagttgtacttatagtctacggggttgatgatcatcccacgggcagagacgtagaagcccttggtgtcgtaggcattgcctccgacgcggttcacgtgcgaccagtagtactggctgctgacctggacgttgtggaagatcccctggaactcggctgtgaacttattctcccatcgggcatccgtcaggtcgagcgacatcgcgttgcgcttgtcgacggcggtgaggtacttcttcgagtaggcgatgtgcgagccacccttgaggtcggactcggacttcacgtgcataccgctgaagccgatgtggaagccagccccctcggtcagcacggggcgccagacaagacgccccgctacggtgtagccctgtgcacccttgtcggtgctggtggtgagagcggagttgtcagcgaaggcaccatactgccaccagatgtggtcgttggagatggtatgcatgataccgatacgacgacctggctggtagacgtttgcctcgggctcatcgaggtactccttgctggcagagctgtaggccgaggagagaccgaagggcacggtgtagtggccggcgcggatgaagttattcttgttgaagctgtactgcaggtagacgtccttgagggagaccttgttgttcgtgaaggaagcatctccacggaagtaccagttgtcgccatagtaagccttgaagccgatacgcatatcgcggataccgatcccatcattcatcgtaccgtcctgcgtcttggcagcttcattctgcgagtaggtcgcagcgtcgaagagggcacgacccgtgaccttgacctcaactttttcctgtgcatttgccgcagtcagggcagagagcgaagtgactgcgatgagaagactatgcttgatattcatgtgttagtaacttcttgcttaggatgaatagagtaggtcttagagagtgtcctcgatcttgtcgtaggcgcggatagcctggaggaagcgggcattgacatcgctcatcaggtagagaccgtcagcgttgcgcttgagccccttgagctggagtgggtagaccatcgggggattctgcaggttgagctgctcgatgccacgtagctgcttggtcgtctggtagacgatgttgatgtcgcagtagagcttgccgtccttgccttcgtacttctcgatgacgaccttgctaccgataggggtcttcttctcgatggagttggggagctcgtagggctctacgtcgagggctgccgtgacggaagcgatgttagagtcgtgcccgcagaggaaggagaacttacggcccttggcgttcagctcatcatacatataggtaaggagagggtgggcgacgttgacagcgacgatgggtgcagcgaagagcacgtcaccgtagacgtccttgatacgtgcgatctgtgtccagtcctcgagagtaaggtcgtgaccgaaggccgccttcttctcatcgggctcttcatagtactggaggatgaaggcgtcggagcaggtgttagcgtccttgagtgagcccttcatgcggggctcttcgccacgctcgaggaggatctcggtgttgtagttgtcgaaggcgcagagcttaccttccttgcaggcgggggagtccttgaggtcgagggtagaggccgtgatctcgtaggccttcttaaggtcctcgttgataccgcggatgccgcgcttaccgcccatagcagcgatctgcttgagtgcttccttcttgaaggactcactgatcttcgtcaggcgggggaagaagacggggtccatcttgctggggacgtagcggtggttgacctggatgtctgctacggggaggaaggcggtggtgaagtagcgtgcagtggcgatacagcgctgcatgctattagcgtagatgtttacttcgtctttcgtggggtttgcgttttccttgaagaggcctgcgtcgacggcccatttacggaagtagaggccgaactgattttccagtgcgccacctcgtgaggtgagttcgcttgcgccagcggtccatgcgaaccaggggtgcgtggtgaccttctcgagaaggcttcccttggtggagagtggggcgcggatgttgtgacggctcaggatgaccgcctcagagagcgtgtacttgtccttgaattcttgacttctctgcttctgagcaaagagggagggcgcgaccgcgagtagcaaaagtagcgccactgagtgtttgaactgtctcatgtgatatgatataaataagtcctcttcgcgaggatgtgaccggatgcacctgtagtagctctgcctaagtgggcagggaaatagatcttcccccttcctaaatcaaggcttgacaaatatagcgatatttgatctttctgtgtttggaatgctcctgttttttaaatgtgtatggctgttctcttgctatctttaaatctcttttggtgcgagtgatgtgcctaaatcagagcggggtatcgctcttatatataggtagttgtgagaagctgcggaggagggtgattgcgaccagtactggtcagcgatcgaaccagtactggtcaccaataggaagcagtactggtcaccgcgcgaagtagtactggtcggacgagtgaccagtactggtcgcaagagtccctggatacgggctttgcggaggttgctccacgagtatatactatttgtatggggatgagcgtataaggatcagcgcccttgctgaggacgcgctgcctttcttgatgccatgaagacgccttttttgaggtgtctacgggtagagaacggaggtgtgaaatgggtggattttgtaagtgtcacgaggaaatcaggtgcctttcttaaattattgataaagtccaccctctacggcatgaaaatatttctatatttgcactccctttggcagagatgctgagggggctacgaattggcgtcctgtgaagggattcacaagcattactactcaaataatatatatcgcttaattaactaccgcatgaagcaagcaaagcattgggctgcggccctcgcgctggtcctggcctctggatggagcgccttggctcagacgatcagctcgcccaataagggtcttcagctgcacttctctctgagtcaggacggggcacctatgtatcgcctctccttcgccgatgggcaggagatcatccgtcccagtcatctcggtctggagatgaccgatgcgaagaagtccttcgacaagggcctcgaggtcacggacacgaaggagtcgaccttcgatgagacctggaagcctgtctggggcgaggtcaagtcgatccgcaacaactacaacgaactgctcgtcacgctcaagaagaagagcaatggcgatcccatagctatccgcttccgtctcttcgatgacgggctcggcttccgctatgagttccccggcggcaaggatcgtaacttctacgtcgtcaagcgcgagctcaccgagttcgctatgacgggcgaccacaaggcgcactggatccccggtgactacgacaccgaggagtacgactaccagcacagccgtctctccgagatccgtgggctcttcgacaaggccttcacggagaactgctcccagaccgccttctccaagacgggtgtacagacgccgctgatgctcaagagcgataagggtgtctacatcaacctccacgaagcagcgctcatcgacttcccagctatcaacctcgatctggacgacaagacgatgaccttccgtgtggagctgacgcctgatgcacagggcaaccgtgggcacatcgaagcacccttcaacaccccttggcgtacggctatcgtcagccgtgatgcacgcgatatcctcgcctcgaagctgacgtacaacctcaacgagccttgtacctatgagacgaccgactggatcaagcctatcaagtacgtaggtgtctggtgggagatgatcacgggtaagagcacttgggcgtacaccgacgacctgccttacgtgaagatcggtgagaccgactactcgaaggtgaagcctaatggcaagcacgctgccaatacgaagcacgtcaaggagtatatcgacttcgccgctaagcacggcttcgatgcagtcctggtcgaaggctggaatatcggttgggaagactggttcggcaatagcaaggaccgtgtctttgacttcgtcaccccttaccccgacttcaacgtcgctgagctccatgactatgctaagagcaagggcgtgaagctcatcatgcaccacgagacctccagctcggtcacgaactacgagcgccacatggagaaggcgtacaagttcatggttgacaacggctactccgctgtcaagagcggctatgtaggcaacatcatcccccgcggtgagtaccactacggtcagagcatggtgaaccactacctccacgctgtcaaggaggctgctaagcataagatctccgtcaatgcccacgagtccgtccatatgacgggtctcagccgtacctatcccaacctcatcgcgcaggagtcggcacgtggtcaggagtatcaggccttcggtggtaacaagcctaaccacctcaccgtactgcccttcacccgcctcatcggtggtccgatggactacacgcctggtatcttccagatggatatcaacaagtacaaccccgacaacaactcccacgtcaacacgacgatctgtaatcagctggcttgctacgtcacgatgtatagccccctgcagatggcagctgacctgcccgaggtgtatgcgaagcacatggacgccttccagttcatcaaggacgtagctgtcgactgggatgacacgaagatcatcgaagctgagccaggtgaatacatcaccatcgctcgtaaggcaaaggactccgacaagtggttcgtgggtaatgtcgctggctacgacggccacaagacgaccctcacgctcgacttcctcgatgcgggtaagacctacaccgctacgatctacgccgatggcaagggcgcaaactacaagaccaatcccgaggtctacaccatccgcaaggtacaggtgaagaagggcagcaagctctcgctcacctctgctcctggtggtggcttcgcgatctccatcctacctaataagaagtaaacaccgaggtctccgaccgctctccacagctctactcacagagagtcgtggagtgcgggtggggacctctcctttttcacttacacagagcacttcatatgaaagcgattctgcgccttacctacctctgtctatccctactcttcctctccctcacagcctccgcacaggacgtgcaggtcaagggtcaggtagtagacgacaagggcgaagccgtcatcggggcttccgtcaaggtcaaggagacccctcagggcgtcatcaccgatatcaacgggaatttctccgtccgtgcccccaagaatgggcacctcatcgtctccagcgtcggctatgccacgaagaccgtagctctcagtggcgctacgctcccgctgaagatcgtcctctccgagagtgctgagaacctcaaggaagtcgtcgtcgtcggctacggctccatgcagaagaaggacctcaccggatccgtcagcaccctcaatgcgaagaacttccagaagggcgctatctccacagccagcgacctccttgtcggtaagatcgcaggggtacagatcacgcccgagggctctcctggggctggtggccgtatccgtatccgcggtggtgcttcgctcaatgccagcaacgacccgctcatcgtaatcgatggtgtgcccatcgagaacaccgctgtatctggtgcacccagcatcctcagctcactcaaccctcaggacatcgcttcgatgaacgtcctcaaggatgcttctgctaccgctatctacggttcacgcgcctccaacggggtcatcatgatcaccaccaagcgtggtaaggtcgggcagaagacccagattgctgtctccgtacagagctccctctccgaagctgctcgccgtgtgcgcgtgctctcggctgatgaataccgcacgctcatccagcgtatctcccccgctacggcctcgaagctcggcacggcgaataccgactggcaggacgagatctatcagcttgcctacggtggtgactacaacgtcagcgtcagcggcgctgctggcaagctcccctaccgcgtatctacgggcttctaccaccaggagggtgtactgaagaccgacaagatgaatcgcttcagcggtgacatcagcctcaatccccgtctcttcgacaatcacctctctatcgatgcgagcgtgaagctcagcgctacgcacaatcgcttcgctaacaaggaagctatcggtgctgctgtacagtttgaccccacgcgtcccgtccgtgatgctgacgctgcctacgcgcccttcggtggctactggacacagctagacgggacagacctccagaagctcgctcctaagaaccctgtcgctctcctcaatcagaaggaggatatcagtgatgtcttccgcacgatcagcaatctgaagatcgactataagctccacttcctccccgagctgaagctcaacgtgaacctcggctacgactacgcttcgggtaagggtacggtcgtcatccccgagaactcctccctcggctggcagcgctacaccctcaagcaggccggtcagcccgacgtctataagagcggtacgaacaatgcttacgaccagcgcaagcgcagcctcctcttcgacttctatgcgaactacgtcaaggagcttcgctcgctgaagagccgtgtcgacgtcatggcagggtactcctatcaggactggaagaccttcgtccacaacacgcctgactacacctacgacaagacgctcgtatcgactcccgtctacgagtacgactacccacagaatacgctggtgtccttctacggccgtctgaactacagcctcatggaccgctacctcttcaccgctacggtgcgtgccgacggctcttcgcgcttcagcaaggagaaccgctggggtatcttccccgctctggcactggcttggcgtatgaatcaggagaatttcctcaagaatgtctcttggatcgatgacctcaagctccgtctcggctacggtgtcacgggtcagcaggatggtatcgggaactacacctacctccccttctactcgctcagcacgaatacggctacgtatcagttcggcgaccagtattacaacatgctccgcccagctgcctacgatgcgaacatccactgggagcagacggctacctacaacgtaggtcttgactacagcttcatcaagggtcgtctctctggtacgctcgacttctaccagaagaagaccagcgacctgctgaacgagatccccacgcctgcaggggcgaacttctctaaccgtatcctcacgaatgtcggtaacatctccagcaagggctttgagttcagcatcaatgctacccccatccagaccaagcgcctgacgtgggatgtgagctacaacatcagctccaacagcacgcgcatcaccaagctcaacgctgtagaagtccccggctatcagggtgtccccacggggggcgtcacgggtctgacgggtacgaacgtacagatccactccgtcggctatgcccctggtaccttcttcgtctacgagcagaagtacgatgctaacggcaagcctctggaaggtcagttcgtagaccgccacgaggatggcgtcatcaacgagctggataagtaccgcacgcacaaccccgagcctaaggtcacgatgggcttctctacgagccttgccttcgaccgctggacgctctcgacctcactccgctcgggtctcgggaactatatctacgacaacatctcggcctatatggctacgcactccgctgtgctcaactcgggtcagtacttccgcaacacgacgcctgagatcaacgtctcagacttccagacgaatagcgataagcagttcatctcggactactacctccacagagcttcgtacctgaagatggacaacctcacgctcgcctatgacttcggtcgtatcctcgggcgagctaacctccgtgcttcggctactgtgcagaatgtcttcacgctctcttcctacaagggtctcgatcctgagcgtgctatcgacttcagcctctatcccatcccacgtacgtactcgctcaatctctccctcacgctctaatcttcacagccgatcatgactacagataagaagattcttcgccgaggcctcacggcgcttagccttgtcacggctctcggcctctcctcctgcaccaaggatctggaccgcttccccaccaacggggagacttcccagacgatctataactcccctgcaaagaccttccaagcgttcgctaaggtctacggcgcattcgccctctcgggcaatggtggtaaaaatgaagacggcaacggtggggatatcgcgggtatcgacgaaggggcgagtgactttgtccgtggcctcttcaacctccaggagctgcctacagagacagctatctgcgcctggggtgacggtggtgtgcccgacctccatacgatgagctggtcgtcgtcgaaccccatcgtccgcggcctctactatcgctcgatctatcagatcaagctcgcctcagagttcctcaagaacaccgagtcgcaggcctccgatgctacggtccgcacctaccgcgccgaagctcgcttcctgcgtgcctatcagtactgggtgctcatcgacctctttggcaatcctcccttcgtcgacgagtccacgcctacgggtaaggtctatcctcgtcagatcagccgtagcgagctcttcaactatatcgagagcgagctgaaggctatcgagagcgacctcaagacgcctaaggcgggtgactacggtcgtgccgaccaggctgctgcctgggcactgctctctcgtctctacctcaatgcagaggtctacacgggtacggagcgctacgccgatgccgctacctacgccgagaaggtcatcagctcgggtaagtatagcctgcactccacctacgcaaacctcttcctggcggacaacaacctcagcaaccctgaggtcatcctctccgtcaactatgatggtaagaagtcgcagaactggggtggtatgaccttcctcatcaactcctctacgggcggtacggcgaaggctgtcacgggtgtcgctatgggcgtcaatggtggctggcagggtaatcgcgctacgaagggtcttctcgacctcttcggtgcgaataaggcgaccgacaagcgctgcctcatgacggcagctgctacggcagacatcgcctcggtcacgaacttcgaccaaggggtctatgtccataagttccgtaacgtcaccagcaccggtgccaacggtagcgatggcgaccagtgcgatgctgacttccccctcttccgtctggccgagctctacctcaactatgctgaggcagctgtccgcggtaaggctaatacggctacgggtctgcagtacctcaatctcgtgcgcgctcgtgcctacggcgctacgacggggaactactccgccctgccttcgctcgacgagatgctcgctgagcgtggccgtgagctcttctgggagggtcaccgccgtacggacctcatccgcttcggtaagttcgtctccgctgactacgtatggccttggaaggctggcgtgaaggctggtgctgcttcgcaggcctaccgcacgctctatccgatccctgcagatgatatccaggcgaaccccgagcagctcaagcagaacacgggttactaatccagcgtagggcgcacttcgctccctccgacggcctcgccccacacgggcgatccctatagaaggcttgccctcgagctcccactgtggagcccgagggcaagctgctttatatcatcaccttgcacgcctatatgtggcttcccaatagaagggggtggtatgaacctatattggtcatcgggctgacctatatagatcgctcttccgaccaatataggtcacgacgcggacctatataggtcagcccgatgaccaatataggtcggtagcacctcccacgggtgtcagctacagatgccgtgggagagagggggggcgaccagtactggtcagtgagcgaaccagtactggtctccaataggaagcagtactggtcactgcgcgaagtagtactggtcggacgagtgaccactactggttggtttttgctcctgctaagaggctgtctgaaagctcccttttttagagcctaaattgaggggatcgggtgggagagaagaggagtgtttgggagggctttcccgagtggcgctctacttatatataagagcgggggcggggaagaggctaaaaaagcgtacctttgcatacataaggaataacgacgctatgacccaagccgaagaccaagagctccagcgattacaagtcaatatccgacgtctcgccggtattgtcgcagagcagaacgagaagctcgctcagctcaggatgctccttcagcaacgggatgaagctcttcttgcgatgcaagaagaactcaagtcagtgcgacgacacgaagcgaccttggccactgcctcggcacttgtctctcctgatatgggagatgtcagccgtagggatgcccgggagctccttgatgggatcatcagtcagctcgaccgctgcatcagccagctcaccagtgagcccgaggccaccgcagcgtctgagcccgagatatagtcagagaccgaatagcttggggccaccccgccccgctaccgatatatggataccaataccagcccagaggccctgcagcgtatcacactcgctgtcgagcacacccgcctctcgctctacgtccctcgctccgaggaacgcttctaccgcgatgcaggcgaggagattgccactacgctgcgtatctaccgatataagtaccccaatcgctccgaggtccccgcagagggatatctggcgatggctgctatcgatatcgctacgcgctacaagcaggtacatactgctctggaagcgcgcaagcagaccttgactccacgcctcgtggagatcaatgaggagcttgagactctgattcgtcaggctcgacagctcattgacgatccccccacctcgtcccgataaccacagcgtccctttccttcagcattacatttatttcagacaaaggaatgggaacaattacgatcattatcatctgcatcggtgcgcttatcctcggtgcggctctctcgtgggtcgtctcggagaagctcctcgggcagaagactcgtgcaatcctcagtgaggcagagcgtgaagctgaagtcctcaagcagaagaagctccttgaggtcaaggagaagttcctgcagctcaagggcgacctcgagcagcaggtggcacagcgcaataataagctcaagcagatcgagggccgactgaagacccgcgagcaggagctcacgcagcgccacaatgaggtggagaagcgcaaccaagagatcgatatactcaaggaaaagctcgccctacagagtgagggcatcgagctgaagaaggaagaatacgacgtcaagaaggccgagtacgaggagaagaaggctgagctggagctcctccgtcagagcgagcagaagcgcctcgaagccctcggcggactctctgctgacgaggcgcgtgagcgtcttatcgagagccttcgcgccgaagccaaggaccaagctcagggctatatcaacgagatcatcgaggaagcgaagatgaccgccaacaaggaggccaagcgcatcgtcgtacagtcgatccagcgcctggctaccgaaacggctatcgagaactccgtcaccgtcttccacatcgagagcgatgagatcaagggccgtatcatcggccgtgaggggcgtaacatccgcgccctcgaagccgctaccggtatcgagatcatcgtcgacgacacccccgaagccatcgtcctcagtagctttgaccccgtgcgccgtgaggtagcacgtctggccctgcaccagctcgtccaagacggccgtatccaccccgctcgcatcgaagaggttgtctcgaaggtgcgtaagcagatcgaggaagagatcatcgagacggggaagcgcaccgtcatcgacctcggtatccatggtatgcaccccgagcttatccgcctcatcggtaagatgaagtaccgctcgtcctacgggcagaacctcctccagcactcccgcgagaccgctaacctctgcgccatcatggccagtgagctgggtctgaatcccaagcacgctaagcgcgccggcctcctgcacgacatcggtaaggtacctgatgacgagcccgagctgccacacgcactcctggggatgaagctctgtgagaagtacaaggaaaaggcgaacatctgcaatgccgtcggggcacaccacgacgaagtcgagatggagagcctcatcgcccccatcgtccaggtctgtgacgccatcagtggcgcacgtcccggtgcccgccgtgagatcgtcgaggcttatatcaagcgcctcaatgacctcgagcagctcgccctctcttatccaggagtggtgaagacctacgctatccaggcgggtcgtgagctccgtgtcatcgtcggtgctgagaacaccgatgacagcagcatcgctacgctctcagctgagatcgctaagcgcatccaggacgagatgacctaccctgggcaggtcaagatcaccgtcatccgcgagacccgcagcgtcagctacgccaagtagtctcccgaggtgtggggctcctccccgcacaagtgggtggcgtatggcaaccaaattcccctgtggcgtgtttacagcgtaggaggaataaccatccatatttattgcatgcaagataacgatcagatcatcgacgaggtcacctcgagcgattacaaatatggcttcaccaccgacatcgataccgagaccatcggcaaggggctcagcgaagagaccgtccgcctgatctcggagaagaagggtgagccagagtggctcctgcagttccgtctcgaggcctaccgccattggctgaccctcgagcaacccgactgggcgctgctgaagatcccccctatcgactaccaggatattatctactatgccgctccgaagaagaaggagggtccgaagagcctcgacgaggtagatccggagctcctgcgcaccttcgagaagctcggtatccccctcgaggagcagaagatgctctcagggattgccgtcgacgcggtcatggactccgtatcggtgaagacgaccttccgcgagaccctcgccgagaagggcatcatcttctgctccttcagcgaagccgtacgcgagtaccccgagctggtgaagaagtacctgggcgtcgtcgtcccctataccgataattacttcgctgcgctgaactccgccgtcttcagcgatggctccttcgtctacatcccgaagggtacgcgctgtccgatggagctctccacgtacttccgtatcaatgccatcaacacggggcagtttgagcgtacactcatcgtcgccgacgaaggtgcctacgtcagctacctcgagggctgtaccgctccccagcgtgatgagaaccagcttcacgccgccatcgtcgagatcatcgtcgagaaggaggctgaggtgaagtactccaccgtgcagaactggtaccctggcgacaaggagggtaagggcggtgtctacaacttcgtcaccaagcgcggtgtctgccgtggtgccagctccaagctctcctggacacaggtcgagacgggctcagcgatcacgtggaagtaccccagctgtgtgctcgagggggatgactccgtagccgaattctactccgtcgctgtcacgaacaacttccagcaggccgacaccggaacgaagatgatccacctcgggaagaatacccgtagccgtatcgtctcgaagggtgtcagcgctggtaagagccagaatagctaccgcgggctggtctacgtcggccccaatgcggagaatgcccgcaaccactcgcagtgcgatagcctcctgctctccgaccgctgcggtgcacacaccttcccctacgtccatgtcgacaatgacacggcgatcatcgagcacgaagccacgacgagcaagatcagcgaagaccagatcttctactgccagcagcgtggtatcggcgtcgaggaggccgtgggtctcatcgtcaatggctacgccaaggaagtcatgaataagctcccgatggagttcgctgtcgaggctcagaagctcctgagcatctccctcgaaggctccgtaggctaatccccatcacccccatttccgaatcatacagatatgcttaagatagagaacctccacgcatccattggagataaagagatactcaagggaatcaacctcaccgtaggcaagggcgaggtgcacgccattatgggccccaacggctcggggaagagcaccctttcatcggtcctcgtcggccaccccacctatgaggtgacggagggctccgtgaccttcgagggtgaggatatcctcgagcttgagcccgaggagcgcgcacaccgcggcctcttcctcagcttccagtatcctgtcgagatccctggcgtcagcatggtgaactttatgcgtgctgccctcaatgagcgtcgcaaggccgctggtcttgatccactgcccgctgctgagttcctcaagctgatgaagcagaagcgcgaactcgtcgagctggacaacaagctcgccagccgctcggtcaacgaaggcttctccggtggtgaaaagaagcgcaatgagatcttccagatggctatgctcgagcccaagctcgctatcctcgacgagacggatagtggtctggatatcgatgccctgcgcatcgtcgctaagggtgtcaatgagctgcgcagccccgagaactctaccatcgtcatcacgcactaccagcgtctcctggactatatccgccccgacttcgtgcacgtcctctacaaggggcgtatcgtacgtagcggtggccccgagctggctctcgaactcgaagagcgtggctacgactggatcaaggaagaggtaggagagtagtctgaccatggaagcgatcaccaagaagtaccttgacctctacgctgcccttagtggggagctgcaggagcgtccacagctactcaatcactaccgcgaggcggcttatgacgccttcgctcgtctgggggtaccccgcttcaagagcgaggactaccagcgtaccgacttgcccagcctcttcgccgaggactggaagctccacgtgctggacggtgctccttactgggcatcgcaggccttcgcaccggagatcttcatcggtgcattctctgacttcgtgcgcctgcatcccgagctggcgcaggagtactacggccgtatcgcgcccatcgctactgacgggctcgtcgctctgaacaccctcttcgctgccgaggcgctcgtcatctacgtgcctcgtggtgcgaagatccctggtcacatcgagctgagctatatcctgccacgtctcggggggcatatctccgtagagcgcgcgcttatcatcctcgaggatgacgccgaggcgacgcttcacttccgtgactgccccgagacgacggagcgcgctatggcgctgcgcaccatcgaggtccacgtcgggcgccgtgctcgcttctcgctcatcgagcgtgaggagtcggccgaggcgaatgtgcgtatctcctcgctctacgtccgtcagatgcaggatagcgtcgtcgacctcagcggtgtcacgctgcgcaatggtgtgacgcgcaataactactccgtcactctggccgaagagcgtgctgacctcaaggtctctggcttcgtcctcaccgcagggaaggcacatgcggacaacttctcctacatcgagcatgcagtaccgcactgtacctcggatgagctcttcaagtatgtgctgcgtgatgatagccgtggtgtcttcacggggcgtatcctcgtggcgcaagacgcgcagaagacgcaggcttatcagaacaaccgcaacctcctgctctcgcctacggctcgtatgcagtcgaagccccagctggagatctacgctgacgacgtgaagtgctcccacgggatgaccacgggtcagctcagcgctgatgccctcttctatatgcgccagcgcggtatctccctcgaggaagcccgcctgatgctgagtaatgccttcgccgaggacgtcgtagcacgtatccccgtcgaggagatcgctgacgacgtgcgtgcccgcatcgaggagcagctgcgtaagtagcccgcctacctataagatatacgacccgcgcccatggctccgagtgagctatgggcgcgggtcttttattatctatatgtgcgacataatggcgtgtaataatgccgtttatgcgatgttatctcatcgtttcggtcataatggcgcgcttttggggctgggtacgtgctttgcagaagggtatgtagcgtgggcactaaggtccaccccccctgacataaaatgaacattaataagtataccatcaagtcgcaggaggccctgcagagcgctatcgagcttgctcgcaaggccggcaatcaggccattgagcccgttcacctgcttacaagtattttgactctcggagatagtcttactgacttcctcctctctaagctcgctatccagcgtgctcgccttgaggagagcctgcagcgtatgctctcggctctgcctaaggtctcgggtggcgaaccctatctcagctccgatgccacgaaggtactcgacaaggctgaggacatcgccaccgagatgaaggatgagtatgtagctctcgagcacctcttcctcgcactcgcagaggtcgatacctcggtagctcgactcctcaagagcgacttcggcctgcaggtcgcagagctccgcaaggctgtcgacgagctgcgtaagggcaaccgcgtcaccagccagcacgccgaggagcagtacaacgccctcagcaagtacgctatcaacctctgcgagcgtgctcgtagcggtaagctcgaccctgtcatcggtcgtgacgatgagatccgtcgcgtcctgcagatcctttcacgccgtacgaagaataaccccatcctcatcggggagcctggtgtcggtaagacggctatcgcagaaggtctggccttccgtatcgtccgtggcgacgtccccgagaacctccgctctaagcaggtctactccctcgatatgggtgccctgatcgctggtgcgaagtataagggcgaattcgaagagcgtctgaagtccgtcgtcaccgaagtcacgaagagcgaaggcgagatcatcctcttcatcgacgagatccacaccctcgtaggtgctggtaagggcgagggcgctatggatgctgctaacatcctcaagcctgctctggcacgtggcgaactccgctctatcggtgctacgaccctcgacgagtaccagaagtacttcgagaaggacaaggctctggagcgccgcttccagatggtcatggtcgacgagcccgatgaagccagctcgatctccatcctccgtgggctgaaggagaagtatgagaaccaccacaaggtgcgtatcaaggacgatgccatcatcgctgctgtccgcctctccgaccgctacatcaccgaccgcttcctccccgacaaggctatcgaccttatggacgaagctgccgcacgtctgaggatgcagattgactccctccccgagggcctcgacgagatcgcacgtcgtatcacccagcttgagatcgagcgtgaggctatccgccgtgaggacgacgaggagaagctcgaagagctgaacaaggagatcgctatgctgcgcgaagaagaggctggcgacaaggctaagtggatgcgtgagcaggagctcatcaaccgcatacagcagtgcaagatcgaggtcgagcagctgaagatcgaggccgacagcgctgagcgcagcggtgactacggtcgcgtcgctgagatccgctacggccgactcaaggagaaggaagccgagatcgcctctatccagcaggagctcaccgaggctcagggcgatagcgctctgatccgtgaggaggtcactgccgaggatatcgccgatatcgtctctcgctggacggggatccccgtcgggaagatgctccagagcgagcgtgagaagctcctgcatctcgaggaagagttgcacaagcgcgtcgtcggtcaggagcaggctatccgtgccgtcgctgacgccgtacgccgtagccgtgccggtcttcaggaccccaagcgtcctatcggctcattcatcttcctcggtaccaccggtgtcggtaagaccgagctggcgaaggcgctggctgaagtcctcttcgatgacgagacgatgctcacccgtatcgatatgagcgagtatcaggagaagttctccgccactcgtcttatcggtgcacctcctggatatgtaggctatgatgaaggtggtcagctcaccgaagctatccgccgcaagccctactccgtcgtcctcttcgacgagatcgagaaggctcaccccgacgtcttcaacgtcctcctgcaggtcctcgatgacggtcgtctgacggataataagggccgtctggtgaacttcaagaatacgatcatcatcatgacgagcaacctgggctccgacctcatccgtgagcgtctctccaacgtccccgctggtggtgagcaggctgctatcgatgagacgcgtgagttggtactcggccttctgaagaagacgattcgtcctgagttcctcaaccgtatcgatgagaccatcgtcttcaccccgctgggtcgcaaagagatcgacgagattgtccgcatccagctcgacagcacggcccgcctcctgcaggtcaatggcatcgagcttcgctatacgcccgaggctgtcgaatggatcggcaaggaaggctacgaccctgagttcggggcacgtcctgtacgccgcgtcatccagcatgtggtgctcaatgagctctcgaagagcatcctctcgggtgctgtcgaccgctccagcgtcatcactcttgacgtcgaagatggacagctgcgcttccgctaagggcgcacgtcccacgtgatattgttagtttagttgttaggggttgctcctctgtaggtctggatgcttgcatcctgcctgcagaggagtttcctttttatacagcggagggtagggatacgggcctatattggtcgctgggctgacctatataggatggcgaagaaagctatatagctttggactgatccctatatagttttgtgatgtgacctatattaggttgttgctccgtgtagggataaaagttgtggacgagtggcagataagtttgggctacgtgcgtggacgataaatctacgtacgtggatatttggatttgcatacctggtctttaagactacgtgcatagatgcggaaaagccactacgtgaaggtgctttttctttcacgagaacgatgcttttccctctgcaggataagaggaatactcgcgataaggcgaagggcttgctcggtcgcttcggagaggtatatcggagagctgggcgtcactcgctcctccccgagaggcacctgctacggcctgtggaagcgcatcttcttcacccgcacggtcaccagaaaagcgcggcttcgtatggagaaatcaagaggcttgccccgagagatacaagtattgtgaagagcttgctatctttgctgtataagtcaatcacctgatccccaccacatacccctccctcttatgaagatcagatacgccctccttgtggctctctcgctctcgttacccagctatgggcagaagaagcagagcgctaaggctaccccccagatccaacgggtgcagcagattcagcgcatcctcaagcccaatacgagccgacagaatgatcgtaatcgtattaatatcccgctcacccgcgaactcatcgactacggcatgaagaagcacgacctcaatatcctcctccagggctactcggagctctggctacgcacgatagatcgagatcccgaggcgaagatcaatgcctaccagacccttcataagctgaagagcctgccttggctgacggcgacggaccgcctggccctcaagctcttcaccctgcgctattactacaggcatcaggatcgctatcgctaccgctctgaggagatcgtggcgaagcatgtcgatcctgtgaatcccgagagctggagccagcaggactacaataccttctacacgacccgtatccgtgagctcatcagcgatcccgcagcgctgtcggcttcgctgaagccttactccgccgccttctctattgatgaagggacgatcggagagcctacgttcggtacggagctactcaacaacttccccgaagatgatacccttgaagccctgcatcgtgaggtgctgaagaccctccgccctgccgctgaggcgagcaagagcatctactatcgtgcgcttatcgacaggcatcagatcctcctcgacaaggataagatgacagagacccagcgcatcgaggctcttgagggttatctcaagaagtatgcgacccatcaggaggtcagtacgtggctcggctcactcctcgagctctatccctaccagcgtctgcgccgtgcccgcttccttgagtcggtcatccagcgtgtgacggggcttactccagagatgcgcaagcagcttggggaagaggccaagcgatgccgtcgccctgagctcctacagagggctgaccatagctacctcgatagggtaggtgtccacctggaggcaccctatctcgtgacgaaggccacggtgcagctctacaaggtccctacgattatccgccccgatacgcgtgaggactggaagcctacgcgccaagacaagcccatagcgacgaaggaggtgaccttccagctcgatgacttaggcgaaggcaggggagctgagccctttagcctggatctccctacagctgggaactatatcctcttgaccaagttcggctactctccggaggcttcgtccaaggacttggatgcggagagtagtctgatgcgtacggagtacgtctatctcgctcatgaagcgggggatgtcggatctcatcagtggctgaatgctcgcaccggtgcgcccgtggcggatcagtccttcgacacctatcacctgtcctctttcaggggagacttcgagcataagggggatgtgaagactgatgccctcggctactaccgtctcaaggatggggagtggcgctacttcatggcgtcggggaaggatccgctcatcgcttactcctaccactcccgaggtcggagtaggtctgatggcccagctgatcccctgcgtctctatgcctaccaaggctatgtgaccaccgaccgtcccgcctatcgccctggacagacggctcatatctatggggtgtactccgaggtacgtatgcacgcagaggatgctcgtgtagcagcttcgaaggccctcacgcttgaggtcatcaatgcatcgtatgaaaaggtgcaggagctcaaggtccagacggatgccttcgggcgcttctcggccagcatcaccctgccgaaggatggtctcacgggtgactatcgtatccgcgctcgtacggcatcggagcgagatcaagagctctcgcctgagttcagctgtgagttcgctgtcttcgagtataagcgcgaggggacagagcttaccgtcgatatgccccagcctccctatcagtatggtggcacgctccccatcacgggctcggtgcgtacgctcagtggtagccccgtagcggatgctcgtgtgagctacacgctccgccgctccgtctccctctggagcttcagagagctgagcgtcgactatagcgaccgcagcgagatagaggatatcacgtcggaggtcgtcacagatgcctcggggcgctattccttcacggtgcctcttcctgaggatccccagaagctcacgcagcgtaagggggattacttcgctccgtggtacagctatacgctgactgtcacctcgacggacggtgctggtgagagccatcaggagatcctgaatatccccatcggtcagcctgtgggagtggtgaatgtgaatctgccccagttcatcgaccgtaagagtgcgagcacgacgcttcgcttcacgaacgagctccatacgcttcgctccgagcttccgaccgttcattatcgcctcacgagtggtgggaaggtgcatctgaaggggacgacgcctactgatagcatcatcgagctcgctcctcgcttagcttcccttccctcgggacgctatgagctggactataccgtcaagtaccgcgactcgctctcctatgttgggcagatggctctttacctcttcgatacgcgtgacagcaaggtcagcgacctgcgtgcgcccctgctcctctccgcaggcgacgggaagtatggcgcagggaagaagcccgtcgtctactatgcgacgagcctccccgatgcctacatctactatagtgtatatagtcagcgtggccccattgcctcgggcgtccttcgtccgaaggctggtgcgctgtgtacgctcccgatagatatctccaaggagcccaccgagcctgaagagatcgatgtaaagctctacaccgtgcgtgacggtcgcttcctccgcgaagaggtgaagcttcagcgcacacaacccaagaaggagctgcagatcacgtgggatagcttccgtgaccgactgaaggcaggcgataaggagacgtggagcttcacgctccgtgacgataaggggcatcctgctgaaggtgtggcggtggccgtctggatgtacgatgccgccctcgaagccttcggtacactggagccatggcgtcctacgctgcgtctgaaggagactgtacattcgcacctcctcggtagttactacgcctctacctataagcagagtggagggcgctatccagatggagcgtggtggactgcttggctgggtgataagcctcgtggggaattccgctcacccttcattaagaagtcggctactgccgaagaagatgatgatgaggaagaggacaatgtagagacgatgctcgcggtcggtagccctatgctatatggtgcaagatccacgatgcagctctcagcagaatataagatcgtctctgccccctccgatatgggctcttctcgtactcgtgcgaaaaaggcagaagagagcgcccccaccgtgaagctccgcaaggacttctccgagacgacgttcttcctccccgagctaaagaccgatagcaagggacaggtcagctggagcttcaatgcccctgagcagctctctcgctggcgtctcgtcctcaacgcccacagccgtacgctggatcatcatattgagcgccgcacggtagagacatctcgcgaattcagtatccgccccacgctccctcgcttcgtccgtgagggcgatgccgccaccctcgtcaccgaggtgcgcaatgagagccccgaggcacagtatggtacgctgaccctcgagcttttcgatcccgcaagtggtgcggtgcgctcgacccaacaacagaccttcgacatcgccgcttcgtcagctacgacccttagcctcccgctggagggctatcgtggtctggactccgtcggcgtgcgtgtcatcgcccgtggtaaccattcctccgatggcgagcagcatatcctgcctgtcctctccgaccgtgagaccatcaccgagacgatcgccttctccacgcactccgaggggacacagcgcatctcgctggctccgctcttcccctctacgggcaagatccctgagtcggggctcttcaccgtcacccttcagcccaacgcctcgcgtctggcactcacggcactccccgtgatgacctataataaggatgcctccgccttcgctgctgccacggccctcttcgggcagtcggtagcccgcctcctcgtaggctatgagcccctacataagtgggcagagggtgtgctgaacgctcccgagtccacgcagaggggtaccagctatggcgccctcgtcgggcgtgacagcctgctctcgaagagcccttgggcgcgtcgcctgaagcaggaagcagagcaagagcgtgagctggctcgcttcctcctcagtcaggatcatacgaccacgagcgatcagctcctcaagcgtctcggcgacctgcagacctccgacggcctgtgggcgtggtacccaggtatgaagggtagcctctataccaccgagtatgtgctgcgtacgctgctgcgtatggccgcctactccgatctggagtccgccctgcgtctgcgccttgaggagatgatccgccgagggatgaaggcactggacaagcaggccgtacgcgatcatgctgagctcgtcaaggctaagcgtgcggggaagagcgcctacatctacactgacatcgactacctctacctcgcagctctagcgaagacgcgtggcctgcgtgatgcctccgaagaagccaagaaggcagagagctacttcctccgcgagctacgcaccaatctccgtgatatgcctctggacgacaagcctcgtgcagcgctgatcttcctccgtgcaggggagaagaagctcgccatggagctcgtcgagagcatccgtgactacctcgtcgaggatgagacggggctcttcttcgcccgcctgcagtcagggagctattcgtggatcagccgtgcactgcccgctgccgtcgagacgctggagctcttctccgaccccgccatcatggatatcgagcgtatcagcggtatcaagcgctggatcgtcgctcagaagcgcaccaactcatgggggcgtgacctcccgacggccgaagccgtctacgggctcacgctcggcgatcctatcgctcatgagctggataaggacgcacaggcacgcattgatctgcccgtcgtagggggcgaagccatccgcctcgagggcgaccggctgcaggtgaagatgcccttcacgagtaccgtccaccccgacaccgtcctgacgctctcgcagtcgcagcctgccgtcctctgggggagtgctacggcgacctacaccctgcccacggcagaggtagaggtacgtggcaagcaaatccagatcacacgtgagaccttcctcctgcgtcgagggagcaagggcgatgaactcctaccactcgccgaagggcaggagctgcgtgtcggtgaccgcctccgcacacgtctcacgatccgcctcgagcagtccctcgactttgtccaagtcatcgacccccgcccaggcttcacggagcccatcatccagaagcccggctatgagtggggcgaaggtacgggctactatgtcgagccgaaggacacggagacgaacttctacatcgaccatctcaaccgcggtacgtacctcctcagctacgaccagtatgtggcacgtgcaggccgcttcgctggcaccgtcgcccgcatcgtctcgtgctacgcacctgactacagcgcgcacacgtcagctggtatcgtgacgagcgtcctacctctcaagaagtaattccccagccgattcgctaagccccccacgagctcactcatgcgagcttgtggggggctttctttgtactcttacgaagggggaagagcgaccagtagtggttcgtgctccgaccagtagtggttgcatatagtgaccactactgcttcgcttcgtgaccactactggtttgctcgcggaccactactggtttctaccacccttcactacgggctctccttttcagcgggtaggcataccgatatcacttcggcaagtatcccccagataccgctacaaaagggcagacgctcactcgctctttttctcattctttggtgctgggctccttccgtgcccttagctccttgaaggggtgaatatccgtataagccttcactatcaacacatataatagataagtaaattgtctatatttgcatataatatgataggttgagtgtatggcaaagaatacgatggggacaaagcttccccgcaaactggagcagaagatgcagatcgtgggggagcagatcaagctcgcccgacttcgtcgtaacctcagcattgctcagatcgctgagcgtgctacctgttcgcccctcacggtcgctcgtgtcgagaagggatcgccctcggtatccttcggtatctacgctcgtgtcctctacgcccttcagctggaggatgacctccttcacatagcgggtgaagacgaacttggccgtcgcctccaagatctctcccttacccagcggcgtcgtgccagcaagaaggaataagctatgcgtaccctactcgtctatgccgacttcgattggcttcctgctcccaccctcatcggtgaacttggctacgaatccctgcgtggcacggatagttacagcttccgcttcagtgaggagtggctacaagcgcacggcgggctatacctgagtgctgatctcaacaactacccaggcatccagtacaccgccagcgatcgggatatctttggttgcttctctgatgctctccctgaccgatgggggcgcaccctacacctccgtcgggagcagatcttagcacgagaggaaaagcgcccactgagacgactctcctccttcgactatctgctggggatcgatgactacgctcgtatgggagccttacgcttcagggaagaggcggatggcgacttcatcaacagcgcctcctcgctccgcatccctcccctgacggatatacgcaccctcgaggctgcaagcaaggagatcgagcgcagtgaactcgctaatgagctccccgacaaacgctggatcgtccaactcatacagcctggctcttcactcgggggagcgaggcctaaggcgagtgtcgtagatacggacggcacgctctgtatcgctaagttcccctctcggcgagatgactatgacgcggggctatgggagcacttatgccaccagcttgccacgagggcggggatcaaaactgcacgtactcgagtcctccgatcaggcgacgagtaccacacgttcatctccgagcgctttgaccgagtgggcgaggggaagcgcatacacttcgcctcagcgatgaccctccttggactgcaggatggggacaatgcctcgagtggctacggctacctcgacatcgtggacttcatcctgaggcacagcggagacacggagcagaacctgagggatctgtatcgccgtgtagccttcaacatctgtatcggcaatagcgatgaccacttccgcaaccacggcttcctgctcacacgtaaggggtggactctgtcgcctgcctacgacatgaacccaacgcttagctcccaccagagcctgctaatcaatagcaccacgtcagaggcaaacctcggtatcttgctggaggcttccgaggaatatatgcttccccgtgaggtagcccgatccatcattgacgaggtacgcgaagcacttgacgattggcaaagtcttgccaaccgtctggggatctcccagagagagatctctttctttgaagatcgctgggatagaggcgtggagctcacgtaagagatgaggtcagagggtgtccacgtggggccgtggagctcttccccaaggaggctgggaggcgtatctaaaatatagagcaaggcactcagcatcagtgttcccaccttttcactatctttgcagtacagaccttacggggatgacctggctttgacagcatgaagaagtggtttgtaagcatgtagtgcaaggcttgtgagcactctaatctcacagagcaaaaattcaactggcgaaaataactacgctctcgctgcgtaaccgaatagagtaggttcgacgcttcatcacgacgacagactgttgtgacgagacatcactcaggtagccgttctcaccgaggcgacttgatcatagtggtgccggaaaatcggagactggcccaatgcttgcccttggcttgggagtgtatttagagggataaggcactgcctatggtagcctcagtcgcgggcggtgcacgaaaacctaaagtgaggataaacatgtagaaagcagattagttccatgtttggaccggggttcgaacccccgcatctccactcattaaggatccgatcaggcgacaatggtggcacccgccccgttgtcgcctgatttctttgtatagactacctttgtcggaggtacactcacttcttactaatccgttgccccacaaagtgccccacatatatgaaccgatcgctacaccgtgcgctctatagctgcgcccttgtcctccttaccttgatgatgtctcagactgctgcccttgccctcccctccgatacgctgacccttagccgtggctggaccttcagcgaacacggcagctccgaggtgcatcctgcgacggtgcctggtgtcgtgcagcaggatctcatccgtctcggcaagctccccgatccctattaccgcctcgcagaggactctatccagtgggtcggtgagcgtgactgggactatgcctgcaccttcgccctcaccgcagagcaactccagcgtccgtcgattcatctcctcttcgaggggctggatacctacgcttcggtctatctcaatgggcagaagatcctcgaggcggagaatatgttcgtagcgcacgaagtcgatatccgcccgtatgtgaaggcatcgaaccgcctggaggtgcgcttccgttcgcctctcaccgctgccctcccgctctacgaagctgcgggcatcaactaccccgcggacaacgaccatgcggagaagcacctctcggtcttcacccgcaaggcaccctatcactacggctgggactggggcgagcgtatgatcaccatcggcatctggcgccctgtgcgagtgctcctgcgtggggcgaccttcttcgctgagcgccccgtcgtgacctatcaccccgagcgaagcctgcccatcgaggtgcgcctccccgagggtgctgtccgtgggagcgaagcgacgcacctcagctaccgcctctatgacgctacggggcggctggtcttcgagcgtacagcacctcttgccgacttcatcaccccgactgagcgtgggggcttgcacgctctggctaatccccagctgtggtggcccaatggcttaggcaagccctaccgctataaggctcgctttgagctccttgaaggcgagcgtggccgtgtgcttgacgtgacgcagtgcgctgtcgggctacgaacagtcgagctcgtgcgtgagaaagataaggacgggcagagcttcttcttccgtgtcaatggtcagccgctcttcgctaagggcgcgaactatatccccggcaccctgattctcccgagccgcacggaggccgatcgcaagcagctcttcgacgacgtcgctggctcacacttcaacatgctccgcgtatggggtggggggacgtacgaggaagatgccttctacgacgaagccgatgcacgcggtatcctcatctggcaggactttatgttcgcctgcaccgcctatcctggggatagcaccttcctgaagaatgtccagagtgagctggtgtacaacatccgccgtctgcgtcagcacccctcggtggcgacgtggtgtggcaacaatgagatccgcgaggcgctgaagtactggggctgggcaaagcgctacccgaaggaggtgtatgagaagttctggcacgactacgaagccctcttctgcaagctcatccccgagacgctgcgtgaggaagaccccctgcgtccctatatcgagagtagccccgacacggtgaactggggtcgcccacaggagatgggtctcggtgaaagccactactggggcgtatggtacggccgtcagcccttcgagatcctgcgtgagcgtatgccccgcttcatgagcgaatttggagtgcagtccttccccatgctcccgagcatcagtcgctttgcccgccctgagacggactacgatctcgagagcgacgtgatgaaggcgcatcagaagagcagtatcggcaatgatgtcatcctccactacatccgtcaggactatcccgagccccgtgacttcgcggacttcgtctacctctcgcaggtgatgcaggggcgtggtatcgctctcggcatccgtgtccagcgtgccgcagcgcccttctgtatgggtagcctttactggcagctcaatgacgcttggcccgctgtctcctggtcaagcatcgactactatggcgagtggaagggcttgcagtacgaggcgaagcgtgcctttgcgcccatcatcctcgtgcccgacaccgcacggggcaagatgctactcacctacgacccgctacctcgccagcgtcaggtacgtctcaccgctgaggtgcgtgacttctcgggtcgcctcataagacgtcatacctttgcccccgagacgctcccagcgcgcgaagtggggcgcctcaaggtcgagcttcctatggagaagctcttcacaagtgatgccgagcgcaacggagccttcgtgcactatgagctgcgtgatgcacggacgaaggcgctcatcaccgagctcaccgactacgctgcccgtaccaaggagctgcgcctacctcgcacgaaggcgggggacttcacgctcaagacgacccgacgtgctggtacgctcttcatcgatatccagagcaagacgctcctgaaggacgcttacatcgacctcggggagacgggctggcagctctcggataacttcctcgacatcctcccaggtcgtcgctaccgtctgcgtgctacgcgccgtcagaacgcccctgcccgcacgacgacagcccttcccaccgtcacccttcgctccatcacgacggcggggtagggtagacttcccgatgactacaaatagccctgagccgtctcttgtgagatcgctcagggctattcgctttaagagccttatctttgtgcgggctggacggccctatcaccccgattacagatgaataagaatatcactcgcatcgccctcaccggcggcccttgcgcaggcaagaccaccgcccttgcgcagatcatcgagcacttcagtgacctcggttacctcgtctatgcactccccgagacgcctacgctctttagcaatgcgtcgatcaacttcggcacgcccgaccgtcagtacttctacaacatcgagaaggctgtgatgaagtaccagctgcagatggaggataccttccttgagctcgcacataccgctccgcaccctgtgctcattatctccgatagaggtacgatggacatctcgaactatatcgagcgcacgatgtggcaagctctccttgacgagctgggtctctcggagatcaagctgcgtgatgctcgctacgacgccgtcatccatatggtcaccgcagcacaaggcgcagaggaattctacacgctggagaacaacgcttcgcgccacgagaccgtagaggaggcgcgtgacctcgatgctcgcatcctcaaggcttggacgggacacccccatctgcatatcgtggagaacaatgtggacttccaggagaagatccgccacgtcctgcaagccatccatgagacgctgggcgacgatcccgctaccttcaccgatatccgccgtcgcttcctcgtgcaggtgcgcggtgagatccccttcggcgtagagaccgacctctatcaagcctatatcgatatggaggacggctcgagtgtccgcatccgtaagcgcggtctgcgtggcaactacgtctacttcatgacacgcaagagccccatcgagtcgcagtccatcatcaccgagcgtcagatcggccccgacgaatatatctcttacctcaactccatcccctcgcctgacgacgtactcgtgcacaagctccgtcgcaacttcgtctgggcaaagcagtacttcgaggtggatgacttcatcgagcccaagcgcgactaccaggtcctcgagatctcgtgcgcaccggatcaggaggtgaagttccctcccttcatcgaggtcctcaaggaggtcacgggcgaccccgtctacggacgcttgtagtccttcgctacttccccataagccatcggccccgcaagacgtgtgtctcgcggggccgatgtggtatcagatgggtaggaggtacgccttagcagcagtagaggctggccgttaagaagagcgtcagggcaagtgtcagaaggagtgtcgtcgggacgacgatccagcgagactgaccatactgctggcaggcgatgagagagaggatgagggagaggacgagtggcaggatcactgcggcgatggcgacccccatactctggcccaagaagagctgattcatcatctgcatcgagagcgagatgaagaatgccagcagcgtgagggtgaagatcaccatcagcgtgaggagggttggtttggggtacacgatagctgaggtattacggcgggcgttggtgcttacagcagcgtgcgtctgtcgggtttagggagtgtgtggggctcccgtattctgtgcaatgccagggtctctacccattggctaagcaaatgtacaagtatttttctcgacaagcccccacacgcgtggagctaagtccccgaaggtagagcacactccccctgagctgagccgtaccgaggctatgatgactactggtattggcgtatctttgtataggctggagtgggccaaaagaccttagccccagccgaatttatcccccttctcacccagccaatggacagcaaacttaccctcggggaggcgcagcgcctcgtcgacgaatggatacagaactatggcgtgcgctacttcgcacccctgacgaatatggctatcctcaccgaggaggtcggcgaagtggctcgcctgatgtctcgtctctacggcgagcagagcttcaagaagagcgacgaaggccataacctcggcgacgaactcgccgatgtgctgtgggtcgtcctctgcatagccaaccagacgggcgtcgacctcgaggcagccctcaaggcaaatatcgagaagaagacccagcgggacagcgagcgccaccgcaccaatctcaagcttgcccccgacacccacccagagactcaaccataatacccacatactgatggcagaaacaaatcaaactaagtacaccgaggcattcggtgctttcgcccctgctctcactgtcgaggagctcgacagccgtatcgctaagatcctcgaagagcgcttcgagaagaacaatactcgtgaggtcaagaagttcctccactcgacgatcgacctgacgacgctctctggtaccgataccgaggagaaggtcgctcagctcgtcgcctctgtcaatgacttcgagggcacggaggacgtcccctccgtcgcagctatctgcgtctatccgaacttcgtcaagaccgtccgcgaagtcctcactgccgaaggcgtgcaagtagcctgcgtcagtggctgcttccccgcgtcgcagagcttccccgaggtgaagatcgccgagacggcactggctatcgctgctggagctgacgagatcgacatcgtcctcaacctcggtgccttcctcgctggggactacctcgaagcctcgacagagatcgaggagcagaaggctacggctcgtggtgcacacctcaaggtcatcctcgagacgggcgctctgcgtgatcccgagctgatccgtcgtgccagcatcctcgcactcttctccggagctgacttcctcaagacgtcgacggggaaggagttccctggcgccgacctgcgtgctgcctacatcctctgctcggtgctgcgtgagtaccgtgagaagtatggcgaagtgcgtggcgtgaagttcagcggcggtattcgctcagccgaagaagctgtgaagtactactgcatcgtcgaggctctcctcggggaggaatggctggacaaccgcctcttccgcatcggggcaagtagtctcgtggggaacctccagcaggagatcctcggctaagcagccctatcattacctctaatatcgcacacaggctaccccgactccgcaccagcggagggggtagcctgtcgtgctatgtagggcattttttgtacgtttgcctaccgataagcatttgacaatcccaccacttatggcattcaatacctcctcctccgagggctcattccttgggcgctacctgcagcgcctctatagcctgcgcttctttgcgctcctactcttcctgctccagatgtgggctgcaggagattactacgtaggggatggacgctggccttacttcggagaggtcatttaccagacgctgagcctcgctacctgggcctctatccccacgctcatcatcgcgctcttcccctatcgctggctgaggaaggtgctgcagggcctcacgatcttcgcctatagctacctgctcctcttcgagtccttcctcgtcttttcctatagctcgctctataccgacagcatcgcgctgaatatcctggcgacgaacccaggggaagcctcagccttcttggagaacctcaactataaggtcttcctcctcccactccttgtgcttctcgtgctctttgccctcacctacgccctcacacgtcgctgggggaaggaagtgggtacgtcgctacgccgtggcctcctcttttgtgggatgctcgtgacgctgcctatctcgtgctttgtcgtgcgtccggcgcagctctctacgatgagctacctctatatggcgcctgtcgagcgtatctacatcggtacgacgagctgtatcgccgatgcggagctactggccaagtacagcgcgaatgcacgcaacttcgatgtgggtgctatcgagcatacacgtgatatgaagggcgtcaccgtcgtggtcgtcctcggcgaatccatgcgccgcaactatatgcactgctacggctatccactggagaatacccctaagcaggactcccttgtcaggacgggcgacctcgtcctcttctccgatgccatctcttcggcagcctggacgacgggctcgatctcgcagagcatgagtttctacacccttgagggccctgagaaggagtggtacaagtaccccgcactgcccctcgtgctctcgaaggcaggctactatacttactgggtcagcaatcaggagaagcagggcacgggtatccagcccatccccacgctcgcctctacgtccgatagcacgcgcttcgtgcgcatccgtacggctggtgactggaatgcctctcccgatagcgatatcctcccgctcctctttgaccgcacgaagactcccgcagggaaggatctctttgaggtcgtgcacctgatgggctcacataccccctattccgatcgctacatccacgagaaggcgcccttcaccgtagacaacctgccgaagacgctccccaacgggaagcctactccctccgacgccaagcgccgtggtatcatctgtgactatgtgaactccatccactacaacgaccagatcgtcgcgcagatcttacagcgctacagccagacgcccgccatcgtcatctacctctccgaccacgggcaggctgtcttcgagaatcccgagcgccccgactactacgagcatgaggtatcgcaggctgggctgatgatcccccttatggtgtacacttcgcctgctttgcgtcaggagcaccccgagatctacgagcagatcgtagcggcgaaggatcgtaagattatgactgacctcttggcgaactctatctgcggtctcctgggcgtcaagacgaagtactataacgcacgtcaggacttcttctccggcgagtacgacaatgcccgccgacgcctggtgcaggcatacgacgggcagatgcgtgagttctaagtcttgtgcgagtgggtgcgtgcccttagaagtctaagagtcggtagcgcttgcgcacctccggcatcgacatacgctcctgatagtgccaccactccttgtcataaggacgtaggccctcggcacctaagagccgcttcatcagtgccctattcgtagggacttctggggcaaagacgcccttcttcactaaagccccttcatctccgaggtgagcctcctcaccgaagtgatcgaaggggcttcccatatccagcgatttgcctgtggcatcgacgatggtgaggtccaccgctacgccgtagttgtggcgtccaccccgctcgggtgcggcgacgtagatcttcttcggcgtacctgccacagcctgatacatacggcgctgtacgctctgtgggcgtgcggcatcatagatgaggaaggcatagccgggcttctcacgctcaagagcctgctgggcacgggcaagtgcgcgtgccagattggggtggaggtaagccttgcgtagcgagccgtacatattcgccccgatgaagttgtcgcgcgtggcgtacttcagctcgacgcggatgcggggagcgagactggtgacctcgacgaggccataggcctgcataagggagtcgaggttgcgagccgagaggctcgtcgtagtgaggaggaagagggcgagtaggaggcgatacattgcttcgtctatggaggggggaaatgcgaccagtactggtcggtgaagtaaccagtataggtcggcgatcggaccagtactggtaactaatagtgatcagtactggtcgaagcagtgaccagtagtggttgaaaatgtcccctccgtgagacgctgattagcagcacgctatgtggggatgtcgggtgcaaagataagaggaagccccgagagtcacgagcggactctcggggcttcccctatgatgtagtcgtcaggtgcggcttacttctcgaggagctcgagggtagagagcttgtagacgacagaggcctggatcatctgctgggcctgctcagcagcacccatctgaagtgattcgccataagcctggttgtagtactcacgtgcctgcttgtagtccttcagctcgcggtaggagtccccgaccatgacgaggaagttgatcttattcatcagggtcgtttcgttggggatagccttctggagccaagcgatagcctgcttgtggtcagcggccgtgagcttcttgccagcagcgttgtagagggactgagcagcgataccgtagtcagcagcgttggcgtcttcgccgaggccattgaggtagctggacatgagcttgatgtactggggcacatccttgttcttgtagatagcgaagagcgcaccgtagtagtcgacggacttttggtaaggcgtgacggtcttgaacttgatcacgtcgtaggccttcttgtagtccgtgcggatcttctcgaggtacgtcttgtaggactcgtcgcccttcttgacgaggtcgagcatacgctcatcgttcttctcgatgacgtagtaggcagcgggctcaccgacagcagcgatccatgcgtcgaggttggagttgatgtactcgacgacacgtgctacttcgtcagcgtcatcaccaccgaggttgctgatgatcaggtagtccttcttgttgatgaggctgttgtcagccatcttcttcgcgaggtagtccttgtagagcttgcggacacgtacgacccacttctcagcgtccatgccgtcctgcgtggtgaggaagcgtggggcgatggtcagcagctcctgctggatcttcaggtcattgggctgtgcgcggtgctccttatagagctcttcgaagcccttgacctcaccgatagcagtcttacccatctcgagcagctcatcggccttcatgaagccgacgttgatctggatagccttgccgtcgggagcgatgatcccgagggtggggaaggcctcgaccttgtacttcttagcgatctcgacgttctcgggagcctcggcatccatctggaggttgacgaacttctcgttgaagaacttcccgacctcgggctgcgtgaagatggtcttctccatcttcttacagggtacacaccaggtagcgtagaagtctacgaagagaggcttgttctggcgctgagcttcagcgagggcttcggcgaaagtccctttgaagaagcgtatgcccgcctcctgagcggagacgaaggagaaagcgaggagagctacgaccagagaggtcacatacttgaggtatctcatagggagcgtgtattaggcagcgtcttggataatgaaggtgaagaggccacggagctcacggctgtagccttcgttgtagacccgtagattgacggtatagcgcccattggggaggttctgcaccgcggcggggaagaggttgatggtaccgccattgacggtgatcgtaccttccttgacagcggcagcgaacttctcggcatcgcccccatcagcgacatcgacgctgaggaactcatagttcacggggttcgtgccggagacaccctggatacgctgggaggtccagggggcgggataggtttgggtcaagctatggggatcgtcatcgtcgaccgtgcggtagacgttgagttccttagcggagaatgtggcgtgcgtcgcatcgaggtagcccacgggcatcttgcggcaagagggcagcgcaagggcgaggatcacgaggagcaggccatatatagatcttgcagtcatcggatgaaaagggtttagaagtccgtaggcgtgaagtcgtactggagcgagtggacgacacccgtacgtgtctggatatcgtgtgaagcgatatcacgtgagatgctggtcgtgggggagacgatgtgcaggcggttcgcccctgagcctgctacccctgcgtaggtgtcgcggaaggtgtagagccagagctgcttgcccgaggccatcgtgtaggtcttaccccccgtaccgatggtgctcccgtcagcagccttacgccctgcggggaagtcctcgaggaggagcttctcttgtgggatgacgcagtcgaggatgatgctgcggcacgtagccacgctcatacggtcgatgagcttcatcgtctcctcgtcggtgagcgtgctgggatcgacggcatcagcgggagaggtgccgtcctcattgataccataggtacggtagaggtagcggcggatgctgtggttcgtgatcccgaggaaggtgatgttcgggccatactgcgtgttcgtcccctggaagaggtcttcgaggccggcacgcttggtcatatagacgaggtagctccagttgtagctatcagtctggaagtactcccacatcgtcgtgtcgtggtaggacgtagccttgcccgtctcgatgaagtcatacttcgtacacgaggagaagaggctgaggacgagtagtgcgagcagatatattggatgcttgatcgtacgcataacggatagatcttagagggtactacatgtagcggaaccagtagggacgctgcaggatgaggccgttgatgaccttaccatccttgtcgcgctgggcgctcgatgggataggcaggcagagggcaccaccagcgatatccgccgtggagagcgtggggaacttacccgtgagctcagtcttgacgtagccgttgcgcaggatatcgtagtagcgggtatcattctcgaggatgaactcacgctcgcgctcacggaagatggccttcttcaggtcgctctcacccgaggcgggataggtcttcgcaccagcacgtgagcggatcttattgaggtccgagatcgccgtggaggtgtcgcccagcttattcgcacactcggcgcgaagcaggtagacatctgccagacgccagtagacgtagttggcattgatgctgaggaagctcttgccagactcagcgctctggtcgatagcgaagactgcgttgcggaacttgtagggcacagcgtagctcacgcccgataccgtgtggtcggtattgaactcatagaagaaggccgtacggcgagcgtcattcgcatcgggatagagcttctggatggtggacttcttcaggcggaaggaagcctgtgccaggtccccttcggtcagtgtgctattgacaggccacgtagcgaagaggttggcgacttcattcttagaggtcgactcattgccacggctcttatcgtagacgagggagaagatctcctcggggttcgtagcactggggtcagagaggagctgacagagttcctcgggagtcgatacaaggctgtaggtaccgacctcgccgttgatgaccttagaggcatactcgacgctcttgcggtaggcctcagtagcgtctactgaagactcgccgtagagctcggccatgctccccttccaggcatagaggtgcgccagaagtgtggcgctattccccttgctaccgtactgcttggaggcgggtacgttaccggaagtcgtgcggagcttgtcgtaggtaggcaggagctcgaaggccttgagggcatgctcgatacctgcgtcgacgacctgctgctgcgtagagaggccgtaggtcttcaggtccttagcgttctccgtgatgaccgcctgaccataggcacgggagagcatgaagtagccgaagccgagagcgaagtgtgcctgaccagcgtggtaggcgtagcgctcttcggagaggccttcggtcttgtcgatattatccagcaggaggttcgcctcgaagatcatacgatagacgtactcccagtcggcggaagcctggatgatactacgaggattcccctcgcggagctgcccatcgtcctgcgtctcgtccgcaaggaggccgaccttcgtcagaggcgtgaaggcgtccatgcagttgtcgaggtagaagtggatggtgctcgtcgtcgtattgagctcagcctctgtggagaatgcattgctataagtgatggcattctcgggcgtcaggtccagcttacaggaggaagccaggagcgtgagcgccagggcgggaaggatatagcgtttcattagaacttcagattgagaccaagcgtaagcttgcggttgagggggtacatacggcccgtgtccttacccgtagcagggtcgacgatctcgggatcaagcccagagtagttcgtcaagaggaggaggttctcaccagcgaagtagatacgcacatccttcatgcggaggcgcttcgtccacgtttcggggagagagtaagagaggctcagctgcttgaggcggaggtagctcacacgctcgatgttggtatcgatgtcgccatcgaactgacccgtgtagccgtcatcagcgaactcgagtgagggatactcggtcttgtcgccaggattctgccagaaggtagcgcgggagaagtcgttcatcacgacgccgaacttcttattgaagaggaaggcaccgttcttcaccatgttcatcatgcgctggtcgatcgtataggtcagcagcacattcagagcgagacgcttgtaggtgaaggtattcgtgatacccccgtaggccttgggcagtgcgctaccagcgtagtagatgtcttcgctgttgatgtagccgtcgccgttctggtccttgatcttacgaccaccgacacgcagtgggtaagcgagcgaaccgaaggagaggggtacacgtagacccgtctggtcgtagtagtaggggatagcagactcgtcctgtacgaggccttcatccttgtaggtgtagataccatagatggggcggccgagtaccttgtcgccgaggtccttgccgtcgtaagaggcgaggaagcggttccagttgcgagcgatattgaagcggaggttccaagagaagtccttgcggcgcatgatgtcagccgagaggtccagctcaagaccttcgttggagatagccgaagcgttcgtccaggtcgtcttcgagatgaagaagttacctggggtgggcacctgcatcagcaggtcataggagtgcttgtagtagtagtctaccttgaccttgaagcggtagttgaagaggtcgaggtcgagaccgaggtcatactggtcgctcttctcccacgtcaggtggctattggccatagcgctgggctggagaccgggctgaccgaggaaggagttcgactcttccatcagaccgtgggcgaggtaggcttcctggaacttctgaccgctcttaccccatgaggcacggatcttaccgaagctgaggaaccagaagtccttcatgaactgctccttggagaaggcccatgcggcaccgagagaggggaaggctgcccagcggacgtcacggccgaagaccgacgagccgtcgtagcggagtgaagcctcgagcatgtagcgcttgtcgaagttgtaggcgacacgaccgaggtagctgagcatgatctgctcctgacggtcggtcgtcacgcgctggaggtattcgtcacgaccctctacgttgcgagcttgtggccagccatcaccgatctcatagatcttgttggtaggaccaccagcagccttacccttgatgttctccatcaggtcgtaggtcgtggtcatccctgccatgaggtcgaagttgtgacggtcacgcaggttgaagcggtaggagaggatgttttcccactggatcatggcgaccatcgagcgagaggcttcgacggaggagaggttgttgctgttgaggtaggaggggcggaagacgtggttgttagagaagtacgcgtcacccgaagcggaggtagcgaacttcagcccagcgatgggggtgtagtcgataccgacggagagacgggcgttgaacatcccgttgcgggcacgtacatcacggatcttctgcagggtgagctgctcagcgatagagccacggcctgggtagaccgtgggcgtttccttagggtcgacgtcgagcccctggatgttggtgccgctgatagcttgctgcttgttgtacgcgaggttgaggcgcgtgaaggcgttgaccttaggcgtgaggcgcaggtcaaggttcgagaggaagctgaggcgcttgaagcctgagttgatctggataccgcgctcgtcatagagccccgtgctgacgaggtagcgcacgttgtcgttccccccagaggcgtagaagtcacccgaggtcacgcggcctacctggaagatgtacttccaccagttcgtgtcattgttatagaaggtattcagcgagtcctgtgcggaggcggggggctggttgtccttcgtcagtacattcccgttaccccagaagtagtcgtaagccccgtcaagggtaggctcccagccgtaggattccccatagcggcgggggaggatgtagcggttggtcgtatagtcgttgtgaccgatacgctggtgctgtgcgaggatgttgtgcacacgacgctctccgtgaccacgcatctgcagaggcgtggaggggaggaaggagatggactgtgagaagttcaggccgaactctgccttgcccgacttacccttcttcgtcgtgatgagcacgacaccgttacccgagcgtgagccgtagagcgaagcggaggcagcgtccttcagcacttcgaccgactcgatggtcgaggggtcaagaccagctaaggcgttgataccaccggtagactcagcagagaccttcgagagaggcactccgtcgacgacgaagagaggcgagccgtcgttgataccctggtcgttgagcgaactgataccgcggatgttgatgcgcgtaccgccaccaccaggcgagcccgactggttcgtcaccgacagccccgacatctgcccctgtagtagggactggaggctgggtgcgggagcgtccttgagctggtctgctttgatcgagctgacagccccgacgagctcctgcgtattgcgtcggccgtaagcgatgacggtgacaccgtcgagtgacttgacgttctccttcaggacaaccgtcacgggctgtcctgcggtgaaggtggcgctattgtcgtagtagccgacgtagcttatctggagctcgcccgaggccttgtcggtattgatggtgaaagcgccatcgatgcccgtctgggcgccgagcttcgtgcccttgatgcggacgctggctccgatgataccttcgccacgagagtccttgacgaccccagtgacttggcccttagcggtagcctgctgctgtgggcggaagatacggatggtcttgccgtcaacagcgaagataaatggagtgcccttgagcaggccttcgaccgccttctcgggagttacctcgtcgaaggagacggtggctttgtagcctgcggtacgaagctcaggctcatactcaatcttgtagcctgagttctgggcgatgaagtcgaggatagaggcgatgtccttgtctttgaaggagaccgagacggtcggcgtcgcaggggtctggcaccagccctcagtgggggtggagagtcccagcgcacacaggcaaagcccgagggccagacgccggcgtattcttaatggttgtcgcatggaggataggtataggtatgacttatctatcgaggtgtagggatatatcagaggcgctgcggtgtgtgtggtgctgacgcagcgactctcagagcccgtgagagagggccctgagagtctactgtcggagtcagctgtgcttgcgcatattgatatgtatagcgagggggcttagtgctcccaggtctttgcttcgggggcgaggctcttgacgacgatgtcacggcgcttgccttcgtcgaggagcttcttcagcagggaggagacgtcctgagctgtgacttcagagaccttgacctcctgaccggtagcggtcttcttggagaggtcgggggccttgcctgtctcagcgtaggcattcaggagggcgatccatacgccgaggctcatgccgtcaccggcttccttggcctcagcctcttcgtcgaggacctgagggatgtggaccttcttatactcgtcgcggtcgatctgacctgctgcgatggagcggaggatctcataggtgcgggccttgaggtggtcggccttagcacgtgaggtgatgaagtggatcgagaggcttgtgctggctacagggtcgtcggtgtagttcgtcttgacggcgatgctgtaggtaccctgctccttctcacgaagctcgtcgaagaggcggttctgcaggaggggctccagcagaccgagggcgatgcgctcgcggtcggtgagcttcttatctccgaggaaggagagctcgacttcgcccagatccccctcggtgtcgacctcgaaggtacgctcgatgacacgctcacgggagctgtggtcacggatcgtgtaggagcgacgtggtgccttggggttgccaggcagggcagccagataggtcgtgacgatgcgcttagcttcggcctcgctgatgtcaccgacgagacagcccgccagctgtgaagcatcgccgaagtgctcagcatagaggcggggcaggtcgctcagcttcatcttatcgtagaaggcattgtcctcacgagggttggcctcggtgatggggttcagcagttcgctgatctcgcggtcgacggcttcgcggccctgctggggcttcgagtcgtagatgtagcgcttacgctggagccacttgtcgaagatatgctgatcgaagcgctgcttattcagtacgaggtagaggtaggagaagaggtcgtctacgccgtccgtcttactacgtgcctgcatcccgtcgatatactcggtgatggagaggttgacctccatggggcggttgcgcagccactgggcgagctggttgcggtcgtacttatagagacctgaggccatgatgaggctctgcatagccgagaaggagggaaggtcggcaggcttgacgatggactggccacccttagccgaagcgaggaagaggacttcgcccttgagctccttggccagattcttatagatgaccttcatgccattggagagcgtccactcggtagcgccgagggaagggatcttcttctcacgagtgatcttccctgcggggagcttgaagtcgatgagcttcgtgataggtgcgggctcgctgctctcggtggcctgtgcgggagtgttgtaagctgagagctccttgaggaactcctgctcggagatcgcttgtgcggagggactattggtgtaggcgacgaaggcgaggttgcggtcacccatagcacgctgcttgagccaagtacgcaggtcgtcagcctccagctcgacgagtgcctcgaggttgtcctcgagctgctggcggaattcgcgcatcggcgtaccgtagaggtagttgttgcggtagatgtcaatgaagttctgtggcgtgccgagacccttgtcgtcgctcagcacttccttcataccatcatagagcttctgcttctcagcctcgaaggcgtcatcgctgaagaagccatagggcatctgagctcgagcggcgaggatctgctggagagcagtcttgtcctgacccgagtagggtacgaagtcccaagcgaactggccgtagccacgtaccagcggtgagtagctcactgaggcagcgatataggcttcctcaccgcggttgcgcaggcgagcgaagtattgtggagcaagggtgttgaagagctgcccgaggaggtagtccttcgtagcctctgccgtggggcggttcgtgggggtggctacacgctgatagagcccgtaggagtgtgagcggttctccttatccgtgaagcgatagtagaggggctgcgtattgtcgtcaatcgcatagggagggcgtgccttagcattgcgaggtgcggggagcgaagcgaagagcttctgcaccttctgctcatagacggcggggtcgatatccccgacgatcatcacgcactgcaggtcggggcggtaccacgtcttgtagaaggcctggatatcgggatacttgaaggtcttcaggacgtcgaggctaccgatgacattgcgcttggagtactgcgagccattgtagatgacgccggcgatgctatcgctgagacgcttgtcgatgccgccacgctggcgccattcttcgatgatgatgccgcgctgcttctccgtatccttctcggtgatggagatgccactgcaccagtccttaaggatgaggagcacggagtcggtgaggcccttctctgtcgtggggacatccatgatgctgtagcgcgtgtcgtccgtaccggtgcgtgcgtcgaagctgtagaggccacgcgtacgcaggtagttcatcacgccacctgggaagtgctcggtggcttcgaaggccatgtgctcgaggtagtgggcaagcccattctgcttgtcgtcctcgaggatagctccgacattctgtaggaggaagaagtgtgccgtaccctcggaggcacccgcatcacggctgatgtagtacgtcagcccgttggggagacggcctgtgcggagggtcgatacttgtgcggatagttgggtgtaagaaagccctcccaaggcagctgctatcaggaggcttttcgcgagtcgagtcgcgcgtggtgtcttggtcgtcatcacgtattggggtctattgatcaggttacgtcagtacagtatagtgggagggcgttcctcccccgagttcagagtaaggcgctttcccgccactcataaaacgctccaaatgtacataaagtgcctcaatactcatactaaggcgcaagaatatggtatgagatgtgataaacaaaggctatcggcgcgctgcgaagaagcgctgcatcagctcgcgcgcctcgtcggcaagcagccctccacgtatcttggcacgacgggggaagaggtcgggcgcatagtgtcggtagccgaacttctcctctcctgcaccatagataatctcccctaagcgagcccagaagagcgctccagcgcacatcacgcagggctccacggtcacatagagctggcagtcggggaggaacttactacccatatactccgtggcggctgtcaccgccagtacctcggcatgggctgtgggatcactgaggcgctcgacctcgttgtgtgctcgggcgatgatctgcccacggcagacgacgacagcaccgatgggtacttcgcccgcctcgtaggccaaggctgcctcagcgagggcctggcgcatgaagtattcgtcagagtaggggaggacggtgctcatcactgcatctcagcttcgtcgaagaggaagggcgcattgcgctcatgctccgtgatgacctcggccataatgacctcgcgcatccagcccgtgcgactcgcgatacgtcggctctcacagtggtcgatgatcgccttgtactcccgctcgttgagggtgagcgtgaggcggtgcgtacgtcggaggcgggggcgtgggcttgcgacccttttcttagccatggcgtgctgaggggaggcggactattgggggatgatgacgtgcagcgagtgggggcgcagctggatgtcgatggtggtacccagctcgaggggctcaccgtcgatatgtacagcgcctgctgtggggcgctcgatgcggagcgacttgatgcgctcggtctcgtagtgcttgttgcccgcgagcttgccgagcatgaggtcacctaagaccatagctgcctcgaggatggggaaggggcgtatgatcgccagatccagcaggccgtccgacaggtctgcctcgggagcgatgtaggcattgttcccgtactgcgtggcgttcgccacgacgaggacgaaggcctccgtctcgagcgtgcgctcaccgtcgttgatgtcgaggcgataggtctcgggcttgaaggagcggtactcctcgatcatggtgcgcaggtaggtcacggggccacgtgtggaggcctcggcgaaggtcctactgacggcagcgtcgaagcccatcccgcaggtgcagaagaagggacgtccgttgagctcgcagctgtcgatggcgatacgtcgaccgctgacgagctgctggatgacctgatcgctcttcatcgagaggccgagcgtgcgcgccagaccattgcccgagcccttcggtacgatgccgagagccgtctggctcccgacaaggccgcgtgcgacctcattgaccgtgccatcacctccgacggctatgacgtggtcgtagccttcgctggcggcacgtcgggcaagctcttcggcgtgcccagcggccttggtgtaggtgaggaagagctcgtactccgatgcgttgtaggcttggcctaagagatcggggatattcttcttcgaccccgtgcctgagatggggttgatgatggcaaggactttcttcatcgtacggggtgattagctaagcgctggaaggcgagctcctcgtacttcgtgccggggcgcccgtagttggcgaagggcaggatgctgataccaccgcgtggggtgaagtccccgacgacctcgatgtatcgtggatccataagctcgatgaggtccttcatgatgatgttcacgcagtcctcatggaaggccccgtgattgcggaagctgaagaggtagagcttgaggctcttgctctctaccatgcgcacatcggggatgtagttgatgtagatggtcgcatagtcgggctgtgccgtgatggggcagaggctggtgaactcggggcagtggaagcgcacccagtagtcgttgccctgatgcttgttggtgaaggcctccagtacctcaggagcgtagtcctggctgtactgggtggtcttcgatccgaggagggagagttcgttctctccgtcacgtatgctggccatagggtagtctgtggtgatgaattagtaggcgcgggcgaagaggacacgctgagctgaaggcttgccggtgaccatgcacttgcctggagtcttgtcgccctcgagggggatacagcggatcgtggccttcgtctcggccttgatcttctcttcggtctcgggagtcccgtcccagtgggcgaggatgaagccaccttcctcgatcttctccttgaattcctcataggtgtcgaccgtgatggtgtggctctcgcggtagtcgagcgccttctggtagatgttctgctggatctcgtcgaggagctgagcgatgtggtcggcgatgccgtcgaaggcacaggtctccttggtgagcgtgtcacggcgagctacctctacagtgccgttatcgaggtcacgaccaccgagagcgaggcgtacgggtacacccttgagctcgtattcggagaacttccacccgggcttcttgttgtctgcgtcgtcgtagcgcacacggatgccgcgcttcttcagctcggcgatgaggggctcgacgtggcggccgatctcgtcacgctgctcgagtgtcttgtagatggggacgatgacgacctgatgaggggcgagcgttggggggaggacaagaccgttgtcatcggagtggctcatgatgagtgcgcccatcagacgggtcgatacgccccatgaggtagcccatacgagctcctgctggccgtccttgttggtgaaggtgacgtcgaaggccttggcaaagttctgcccaaggaagtgcgacgtaccgctctgcagggccttgccatcctgcatcagtgcctcgatggtgtaggtctctacggcaccggcgaagcgctcgttggcgctcttcacaccgacatgcacggggatagcgaggaagtcgcgggcgaagtcggcgtagacattgaccatacgtactgcttcttcttcggcctcctcacgggtagcgtgggcggtgtgaccttcctgccagaggaactcagcggtgcgcaggaagaggcgggtgcgcatctcccagcgcacgacgttcgcccactggttgcagaggatcgggaggtcacggtaggactggatccagcccttgtacgtattccagataatggtctcggaggtagggcgcacgatgagctcttcctcgagcttggcctcagggtcgacgacgacgcccccgtcggggctggtcttcaggcggtagtgggtgacgacggcacactccttagcgaagccctcgacgtggtcggcctccttgctgaggaagctcttcgggatgaagagggggaagtatgcgttgtagtgacccgtttccttaaacatgtcatcgagctggcgctgcatgcgctcccagatagcgtagccgtagggcttgatgaccatacagccgcgcacggcggcgctctcagctaagtctgccttgatgacgagatcctgataccactgggagtaatccacgcggcggggagtcagttccttgagttcttttgccattatgattatgtgtcgttatctatctctatgtttatgagttcacaaagatactaaaaccaagggagtggcggcgggtagcgctctgggtctcaccagaggtcaaaccgcccgcgagggggtatactatagccgacgggccgagcataccccctcatgggatcgcgtggaggacggatcggtgtggtgtacgcctatcgccctaatgggttggtgaagacaaggcctacgctgggatagaccccgacattcgtattcttcccgaggatgctccctgtgtaggcatcggggctaaatgttccccgccagccgaaggagctataggtgctcagcccgacctgcaggccgatagcatggtagggcgataggcggtagcccagtgtcaggcggtaggtgagccctatcccccaggcattcgccttggtctcagcacggctcccccatgcttgtgctaagccgtgggtgtaggtgacgcccacgctgaggctattccgcaggaggaagctctgtcgatgcagggggcttaccttcgcccaagccagccccacatagctctgctggatacgcgtctctgcggataagtcagcgagcgacctgcgccactgcaagccctgtgcttctaagccgatggcctcccctggcttgtactgtaggaggagctgtgcatgtagggcggggcgtaagccaaagtattcggactgatactttaagccgaagggagagatattcatccctgtgttccacacggtggagagaccgatctcggttgtcagggtaggcttctgcgactcttgagctgctgcggaggtagctactacagacgtagcgaggagcactccagctaatctcttgacgttagccatagggagtacgagctttctcataggatataagtgtgattagggtcggtgatgaggtcacctgaggggtgcatagtcccatcggtgtgtgccgtagggatggggtgttcgtatgacttgttaacggcaggcggtgcttgcttctcacggtcctgctggtgggtgacctcatggcgccttcagggcagggaagtagtgtatcgtctgagagcggagataggaatttttctcacgcaaacgatggggatagggtggaggtgcggactctcgcccttcggtgggtctacggcgtggcggagaaagtcctccctttgatacggctatgaggagcgaagtggtgctgcaatgggctcaaaacgagcgagaaaaagttgtggaggagtagaaagaaagttacgacgcactacgcctattctttcgtctacgtgcgaggacttaaagactacgtaccgagatgataggatttacgtgcctggctctaaaatccacgtacgtagacagcggaatagacgtagtgcttcgggggaacttctcgcggtgcacgagagacgtgcagtgctgctttgcgccttttcctctgctcccttggagggcacccttgtatagctcttcggaagggggctgtatggccttgtcgtcgcacccctacgggagggcggtctgtcgtcgtggagtgcggggccagtggcatagggtggttttcgtatctttgtaattataatagatgtactaatcattttactcacctcaaaaacaacagaaatatgtcagagatgaagaagctacgtgccgccgtcgtcggctacgggaatatcggtcgctacaccatcgaggctctcgaggcagcacccgactttgagatcgcaggtgtcgtgcgtcgcgacccctcgaatgtcccctacgaactccgcccctaccgcgtcgtcagtcgcatcgaggagctggaggacgtcgatgtagctatcctctgtacccctacgcgtctggtagaggccaccgctcagcagatcctcccactcggcatccacacggtcgacagcttcgatatccacaccgatatcctgcagctgcgtaagaacctcggcgagaccgcccgtgcccacggcgccgtctccgtcatcgcctcgggctgggaccccgggagtgactcggtcgtccgcacgctgatggaggctatcgtccctaaggggatcacctataccaacttcggcccagggatgagcatgggccacaccgtcgccgtgaaggccatcgcaggtgtccgcaaggccctctcgatgacgatccccacgggcacgggtatccaccgccgtatggtctacatcgagctggagcctggctacaaggccgaggaggtcatccaggcgatcaagtcggatgcgtacttcgtccatgacgagacgcacgtcaccgtcgtcgatgacgttgatcagctcatcgacatgggccacggcgtacacatgactcgcaagggcgtctcgggtaccacgcagaatcagctcctcgagttcaacatgaagatcaataaccccgctctcaccgctcagatcctcgtcgccgtagcacgtgctacgcgccgtctggctcctggctgctacacgatgcaggagatccctgtcatcgacctgctccctggtgagcgcgagcactggatcggcaagctctgctaatccttcatttcccctctctctgtaagccctttagcctatgcttagtgccatcacttgggacgtcgatcccgtcatcatagatatcttcggccgcggtatccgctggtacggcctcctcttcgccctcgggctcctgatcctcggcccgatgatcgaggagcgtatctggaagcgtgagcgcctgccggaggagtggatgaactccctctatatctatgtcgtcctcggcaccgtcatcggggcgcgactggggcacgtcctcttctataatccctcctactacctcgcccaccctggggatatcctcaaggtatgggaaggtggcttagcgagccacggggggaccatcgggatcatcctcgccgtatggatctactcgcgccgtgtgacgaagaagtccatcctctggacactcgaccgtctggctgtccccacggggctggctgcggcactcatccgtatggggaacctgatgaatagcgagatcttcggccgcccgaccgatgtgccttggggcttcatcttccctcgcgcctcggagttcgctggctacgctgagcgcggtatggcgatccccgcctgccacccgacacagatctacgaagcgctggcttacctcctcgtcttcgccctgtgtatgtacctctactgggtgcgtgacgctgctcgccgctactcgggcctcatcctcggctacttcctgacgggcgtcttcggcttccgcttcttcgtcgagagcatcaagaacgtgcaggaggcttgggagatcaatatggtcgccagctacggtatcaatatggggcaactgcttagcatccccttcgtcgtggcaggcatcgcactcatcgtctacgcctaccgccatccgctcagccctgagccccttgacaaaaagaaaagctaacaacatagaggcgctccccgagtcctgacgactgcgggggagcgccccttccttgtcttatccatactactacaccctatcactacactacggactatgtaccaagtacctcagatcactgactccgtctactacgtcggcgtgaacgaccgcatgaaagagcgcttcgagaacgtctggtcgatcccctcgggcgtggcttacaacgcctacctcatcgtagacgaaaagacgaccctcatcgatacggtcgacgtctgctactcggatatcttcttccacaagctcgacctcatcctgcagggccgccccgtggattatctgatcatcaaccacatggagcctgaccatggtggctcgatcggtctcctgcgtcagcgctaccccgacatgcagatcgtggggaacaagaagaccttcgatatgctcagtggcttccatggcatcacgacgggcctccacgaggtcaagagtggcgatgcgctgcgtatcggtagccatgagttctccttcctgatggctcctatggtacactggcccgaggtgatgttcacctatgagcagtccaaccgcctcctcttctctgctgatgccttcggctccttcggtgcgctgagtggtcatatcttcgatagccacctcaccgaccgccagtcctacctcgatgagatggtgcgctactacgcctgcgtcgtcggtaagtacggccccttcgtcaagaaggcgctggccaatatcgacaagcagggcctcgacatcgagtatgtatgcccctcgcacggtgtcgtctggacgcgtgagggcttcgccgatgcacgccgtctctacgaccgcctctcgagtaacgagaccgaggagggggtcgtcatcctctacggctcgatgtacggcaataccgagcagctggccgacatcctcgcacagagcctcgctgcctcaggcgtgaagtccatcgtctgtcacaacgtcaccaagagcgacccctcggtcatcctgcgtgatgtcttccgctaccgtggcctcatcatcggtagccccacctactgcggtgagctcttctctcccatagagaaccttatgaacctcatccgcatccgcgacgtcaaggaccgcatctacgcggcctttggctcctatgcgtgggctcccgcagccctcaagcgcctccgccccttcgctgaagagatgaagtgggaggctgtcggtgagggctttgagctgaagatggcggaccttccctccgtcatcggcgcagcttgggacctcggcacgcagatggccgagcgcctcaaggcttagtcccccccctaattccaatttgcatatcaatccatcaatttctaaacacagatcgcatgcgtctaatcatccagcccgactatgtgggcatctcccagtgggcagcggactatgtagtccagaagatcaatgctgccgctcctacggctgctaagcccttcgtacttggtctgcccacaggctcctcacccctcggcatgtatcgtgccctggtggcagctcatcaggccgggcgcgtatccttcgagcacgtcgtcaccttcaatatggatgagtacgtaggtatcccccaggatcatcctgagagctaccacaccttcatgtggaagaacttcttcagtcacatcgacatcaagaaggagaacgtacacatcctcaacggtaatgccaccgacctcgaggccgagtgcgctgcctacgaggaagcgatcctcgccgctggtggtatcgacctcttcctcggcggtatcggtcccgacgggcacatcgccttcaatgagccaggctcttcgctgacctcacgcacccgtatgaagaccctcaccaccgataccatcatcgccaacagccgcttcttcgatggcgacgtgaacaaggtacctaagacggccctcaccgtcggtgtcggtaccgtcatggctgcccgtgaggtgctgatcctcgtcaacggccatggtaaggctcgtgccctgcagcaggctgtcgaaggctgtgtgaaccagatgtggacgatcactgctctgcagctccaccccaagggcatcatcgtctgtgacgaagctgcctgcatcgagctcaaggtcggtacgtacaactacttcaaggatatcgagcgcctctaaggctctcgctccccctaagcaaaaggcctcacgccccacgactctcctcggagtagtcgtggggcgtgaggccgttttgcgtgctgtcgtggcgccttagacgcggcggcagcggatgagtacgtgcgagccgtcggaggctgtcgtgccgaagagcgtctgctcggcgctgtccttgatgcggagcttagcgcgcagggcttcggggcgcagggggaagttgcggcaggtgatctgcgctgcaccgatttcccgtccgagtgccttgagctgggacgaggcgaagggatagaccgcctcgactgcgaaggcgcggccagggaagggcgcttcgggcagcgtgtctgccgtgtagaggtggctattggggtgcagggcttcgaggccgtagacggcgccgatactgcggtagagccctgtcttcatcagggcagcgtgaggctcgaagaggtaggcgcgggggctcacggcatagtgtagctgggtgctctcctcatagtgtagagcttcggggaggacgaaggcaggggtaggctgcgtgggatggaggtcttgagcgacgaaggtcaccgtctcgggctccgcttcgcccgtagcctcagcgaggtcgatgaggaggagaagctccttggcttcgccacgtacggagacgacgtgtagctcccgcatgccagcgacggagcggagcgtatgcaccacatcgagcatcggcgagagcttgacgagaaggcgggggaagggtagggagagctcacgatagagggtgtgaagctcggggaggagtgtgtggaggctgggctcacagtcctcgatggcgtagactctacgcgtcgtgtcctcgccctctctgcgggcgggatcgaggtagatgagggtaggctggtgtgtggagatgagctcccgtagctgggggatcgactcaccgtggatgagctggagctttgcctcggggagtaggcgagggaggttcgctcgtgctgctgcgacgaggtctgcctgtcgctcgacgtagaccccttgccccgtgacgctcgtgagtgcccagaagtccacgccgaagccccccgtaaggtcgatgaggcggtcggtggctgtggcgaagcgcgtcttatagcgggcagcttcttcgctcgagcactgctccagcgtcagtgatgagggaaggaaaaccccagccgtatgccagctggggagcttccttcggagggctgactctgccgtcagctgcagggcaagcgctgtgcgctcctcgcgagagagtgatcctttgccgaggaggatcctatcgggggatgtgccccgataggtctcctgcagcgagaggatatgatgtatgaagtcgagctgtagcgacacgacgggtggctacttcgtgacttggatgcggatcttagccgtgggcaggcccttagctgagacggagaggatagcttcgccagccttctcaccactctgtacgagggctacgagctgaccgctgaaggcgtggtgctggggcaggtggaaggcatcgagtgaggcgggattgcccgacgcagcagcacggaaggagccggcgcccgtgaccttgaactgcaggaggcgtgcgtcatcggggatgaggttgccgtccttgtccacgacacgtaccgtgacgaaggcgatatccttgccgtcggcattgatgctcgtgcggtcagcgatgagctcaaggtgatgggggcgaccagcggtgtggacgacctgctcagcgacagccttacctgacttgtcgtaggcgacgaccttgacttcccctggctcgtacttcgtatccatccacatcaggcggtagcgcttctgacgggtgaaggcctcttggctctccttgttctccgtagcgtcgatggtgatgctcgtatccttcttctggcgaccctggctcttgccgttgatgaagagctcggcctcggggtggttggtgtacacgaagatgggggttacctgtccttcgcgcccaggccacgtccagtgggggaggatgtgaagcgtctcagcgtccttgttccagtggctgcgatagagatagaagcggtccttggggatccctgccaggtcgatagcaccgaagagcgaggagtggctgggccattcgctgtagtagggagtaggctcaccgaggtaatcgatacccgtccagatgaattcgcccatgctccagtcgtggtcctcctgacggatgaagtcatcctcggggaggttactccagccgcagtgctcgacgtcgtagcccgaagcctgatggtcggggtacttcgccatgctcttgcgtacgacggggaacttatacacaccgcgcgagctcaccgtggagcaggtctcggagccgaggaggaagccctgtggcaggaccttgtgtgcggtgtcgtagaggaagggacggtagttgaagcctgggatgtcaagggtgccagccataccgctcttcagcacgcctaggggattgtccatgccgttggtgacggggcgcgtggggtcttcgcggtggcagatctcctgtaggcggtaggcgagcttagcgccttcgaagctgggctgctcggggacttcgttcccgatgctccacatgatgaccgaggggctgttgcggaactggtggatgaggttcgtgaggtcacgctcatgccactcgttgaagtccaggttgtagccgttgggcaccttgggctgggcccatgagtcgaagctctcggccatcagaggcatacccatctcgtcacagagacggacgaactcaggtgcgggcatgttgtgtgaggtgcggatggcattgacgcccatgtcctgcatctggcggatctggcggcgcatagcagcctcgttgacagcggcaccgagagggccgaggtcgtggtggaggcaagcgccttggaacttcagcttacggccgttgaggaagaagccttcgcccgccttcagctcgatggagcggataccgaaggtcgtggtatcgcggtcgatgactcgcgagccgtcggagagggtgacggcgtacttatagaggttgggctggttgatgtcccagagcttgggagcggagatatcgaagcccgtgcgatagatgctgtctgctcccttgctggagaagctctctgagcgctcagcgacgaccttaccctcgggagagaggatcttcgtctcgatacgcagtgggcgaccagcgaggtggctaagaccagcgatcttcgtctctatggatacgtaggcttggtcagcacttaccgaaggcgtctggatgcgcgtgccccagagagggatgtaggtgggggaggtgatggtgaggtgcacgttgcgatagagccctgcaccagggtaccagcggctgctctcgtgcttgttctccagacggacagcaagcgtgttgcttgctccggggcgaacgtatggggtgacatcgaaggcaaacgtgttgtagccatagggccagtagccgacctccttgccgttgacgtagacgcgggcgtggctcatcgcgccatcgaagcggagaaagacgcggcgatcaccgaggtcttgggggatgtccaagctgcggcggtaccagccagcccctacgaagggaaggccaccggtacgaccagcatgctccatagcttccttctgaccatcctgtgcgatagccaggtgctgcttgtcgttctcaaagctaaagggcccgtagatcgcccagtcgtgggggacggtgacacggctccacttgctgtcgttgtagtcgggggtggagaaggaagcctggtcctggcgggtgaagcgccaccccttctcgaggaggagctcagagcgctgggcctgtagctggtggctgagggcggcacatagcgcaagggtacatgcgaatcgtcgcttcatgtgagatgagtatctgtatttctatataataatgtacatggagagaagatgcgcccagagtgggcacgatctcaaaagtcaaagataagcaaaaagccccgacccagccgaccgtatgccctgcggctaaaagcagagagctccgccatcctgtcggatagcggagctctacttctgaggttcctggcggaatcgaaccgccgtaaacggttttgcagaccggtgcctaaccactcggccaaggaaccctgtgtggtttgcgcttgcaaagtaactaaattcctcccacataaacaagcacggggcatggggtgcgtgctcggggtggtataaaaagcaagatgcgcatctcagagagacgcgcatcttatagcttgcttagtcagcgtagagcggaagacggggctcaaacccgcgacccttagcttggaaggctaatgctctatcaactgagctacttccgcattcctgatgacggaaaggagtgggcagtgatggattcgaaccaccgaaggcgtaagccagctgagttacagtcagccccatttggccactctggtaactgcccttacctgttctttgcagtgcaaaggtacaaactatttctgaactgtgcaaatgggacggcacatcttcagtgcagtctccgctgcttcggcacccttgttgcccaagcgaccgcctgctcgctcctccgcctgctccatcgtttcggtcgtcaggacgccgaagatgacgggtgcaggagtcgtgcggaggccagtgatagtcatgttcagctgggatatgccgaaggtcacaccctgacagatgtagtcgaagtgaggggtgtccccacggacgacacagccgatagcgatgacggcatccacaccgtcgttcagcaagcgagcggaagcattgacgagctcgaaggcccctggtacacggaagaccgtgatcttctttacctcttgcttgcggagcacttcgagagcgccctctagcaagggttcagtgatgttgttgttccactccgctacagcgataccgatgtgtagcccttccccagaggggacggggctgtagtggagggattggatatggtctatcgtagacatagtctatgtgcgagcggactacttgccctgagcctgagcacgcaggaggtcagcttctacgctttctgcttcgggggtggtgtagtacttcgtcttgacctcgttgtagagggcgatagccttgtcgtacttgccgagcttctcgtagacgtgaccagccttgatgaggcagctgggagagatcgcttcgctggaagcagccttagcagcagcttcgtagctcttgacagcttcttcgagcttgccgagctgtacgaggcagtcaccgatcatgcgctgtaccgagggagcgacgacggcttcatcagcagagaacttcttcagctcagccagtgcttcctgatacttaccctggtcatagaggcagataccgctataggcgtgagcgaggttcgctgcgtctgtaccggagaagttcttggcgatggcttcgaagcctggggcaccagcaccctgacccttgagggcgaggctgtcctgcccagcgatgaagctgtcttcggctacgaacatctgtgcggtagccttctcagccttagggacttggacgaagcggtggtaagcgaagatgccgagagcgacgatgacgacagccgctactgcgatgatgatcttcttgccgtggcgctcgaagaagagttcacccttcattaccttctcatcgatggtgtcgagggcgtcgtgctctgggagctcgtgatgtgacatacgtatttatcttatttgttgttggttattccgctatatcagtggggcaaagatacgacttttcatgcaacctgacacgccccacccagagccctgcagctcgctgggagtgcggggctctgggtggctctatacattataatatataggggcggcttacttcagcagggcctccatctcggctgccttctcctcgaggcactcgaggtagcggagctgagcgcgcgtgcgctggaggttgtgcttgggagagtggatcttgaagtaggtgtctccgttgaggtagtcgacgaggaagcgtaccgtctgcatgtaggtcatcaggcgaccaccgtaggcgatgaggctgcgctcggtgggggtgaggaacttacccgccgtggagaggtaaccttcgacgaaggccttgtagatctccatgttcacgccgatcttcgagaggtctgcttcatcttcgggagcgaagttcacgcccgtacggatgaagtcacccacgtcgctgaggatgaagccaggcatgacggtatcccagtcgacgacgcagagtacagcgcccgacttatcgaagaggacgttgtcgaccttcgtgtcgcagtggatggtgcgcttggggagcttgccctcagcgtagagcttctcctggaggagcatcgagtcggcacggcggtcgatctcggcgaggatatcctgcacttcggcgacacggccagcggcatcctgagcgacagcgtcgcggagctgctgcaggcggaagggcatgctgtggaagttctcaatggtctcaccaagacgaccctcggggatgacggagaggatttcttcgaactgaccgaaggcggcaccagcgtagcgggcggccttgggggtgagctcgctcatgctcatactctcggggatgaagcggcagacgcgccagtagttctccccatcgtggtagtagttcttctcgggctcctcgaggttggggaagaagtagaggtacttacgctctgcttcggggtcgccctctgcttcgaggcgctcgcgcatcgtgtcggatacgatagcgacattgcgctgcaggacttcgatgcgggggaagacgaggtggttcacgcgctgcaggatccagcgtggtgtcccttcacggtcagagactacgtaggtgtcgttgatatggccattgccaaaaggcttcatctccccgatctcagcagaggagatgaacttgctgataatatgctccatattaggatgattcatttttaggtaaggacaaagatatacaaaaagcctatccccacgccagcggactgacgtggggataggtgtatttaggcgaggtctcagcgacctctacccttagcgggtggctcgctcttagaagcggaggcctacgccagcgaagaacgaagcgttcttatagctggtgttagcgatgttgttcttgagggcgttgaccataccgatgtcggtaccgacacggaggtagaccttgctgaattcaagagcggcagaggcgttcagacccatatcgaagcgcttgtagatgccggccttgaaggcatcgagcttacccgtggtagagagaccgtaggcgaagtaggggccagcttcgacagatacagcgaagttctcgctgaaaggtacgcggataccgaggtccacgggtacgctgatgtagttgagaccgtagccatcttcagagatgtacttgaagccttcctggcggaacgtcaccccaggagcgaggtagacgccagaggcaagcccgacttcggtagcaaggctggcgcggaagcccaagcggactttagattcgggggtgacgcctactaccttattgacgccacttgcgaagtttgcgcctacttcgatacggggatggatttcagtctgagcttgagcggagaggacgcctgcaacgagagcgaaggcggcgaaaaatagcttcttcatattcgtgtctatttgtgtggtgaattacggcactatagcgacagagtatagttggccgtaggattaaagataaatgtgcttcatgtcgcgtatatacaaaggtacataaaaagcctattccctcaaaaagcctatccccacgccagcggactgacgtggggataggtgtatttaggcgaggtctttgcgaccggagcccttagcggatggctcgctcttagaagcggtaacctacgccagcgaagaacgaagcgttcttgtagctggtgttagcgatggggtccttgagagcgttgaccagaccgatatcggtaccgagacggaggtaaaccttgctgtattcgatagcagcagaagcgttcagacccatgtcgaagcgcttgtaagcaccagccttgaaggcatcgagcttacccgtggtagagagaccgtaggcgaacgaaggaccagcttctacagatacagcgaggttgtcgccgagacctacgcggataccgaggtccacgggtacgctgatgtagttgaggccgtagccgttaccattgtcgaacttgtagccttcctgacggaacgtcaccccaggagcgaggtatacgccagaagcgagttcgatttcggcagcaacgctagcgcggaagcccgtgcggaccttagagtcagcggtgacgctacctaccttgctgataccacgagcgaagttagcacctacttcgatacgagggttgatggccgtctgagcctgagcagagagcacgcctgcaacgagagcgaaggcggcaaaaaatagcttcttcatattcgtttctttctatgttagagaccacggcaacataccgaagtcgagctgcaaaattagagatatttaacgaatgtgcaaatattcttcaattattcagcctcggataaaacgcatcctgatgatggtatcgtatatatgggaagtcgctggaggagcttttctgccgagaaaagagcaccctatgtagcgtgcgtgtgtatgtaccttcgcgaggggtgaaaagtgaccagtactggtcgccgatcggagtagtactggtcagcgcgcgaaccagtactggtcactgatgcgtagtagtactggtcggatgagtgaccagtactggttgcttttcgcctccccttatctgctggttttagagtgtgcttcgtatgggcagagttatataggatggtgaagaaagctatatagctttggatcaattcctatatagctttcggtgcgaagctatatagcattgtgaagtgacctctattaggttgttgcttcgcgtagggataaaagttatggacgagtggcagaaaagtttgggctacgtacgtggctctaatatctacgtacgtggatatttggactgacgtgcttggtctttaagactacgtgcgtagacagaggaaaagcactacgtgaaggcgctttttccttcacgagaagggcgcttttccttccgctggataagaaaaatactcgcgataaggcgcagggcttgtgtctctcttcggagaggtatatcggggagctatattgacgatcagtcgcttatgcctcgatatgggagccgtgcgctgggtgggaaagggcgcgaagggcagaatttgagtacctttgtttgggtgcttatacatccgtggaggtggttagcttgggcttcggtaatagagaagcccctttctgtgggccctattgtcgggctgcagagcgacttcctccacccatagagcaccacctttccgtaggaaccctccgctggcgagtccttcgcctctcggagtgtctccgatacattatatatatagggagagtagatgccgaagcgcggccttgctccccccgcaagcgaaacgataatcaatggactataagaccacaacggccaatctcggctgctgtgcgatgacccccggaggctgtgaaggctgtgacaggaaccagatgagctcctatgactggctgaacgatatccccgagtcactgcagagctccgacttggtcgaagtgcaattcaagaatacccgtaagggctactatctcaataccgagcggatcgacctctacaaaggcgatatcgtcgccgtcgaatcgacgacgggtcacgatatcggcgaggtgaccctcactggtaagctcgctgagctggcgatgaagaaccatcgctaccgccccgacaagggggagttcctccacgtctaccgcgtcgcccgccctggtgacctcgagcgctgggaggaagccaagcgccgtgaagagccgacgatgatccaggctcgacagatcgcctcttcgctgggcctcgatatgaagatcggggacgtcgaatatcagggtgatggcaacaaggcgatcttctactacatcgctgacgggcgtgtggacttccgccagctcatccgtgtgctcgcagatacctttcacgtgcgcatcgagatgaagcagatcggtgctcgccaagaggcaggtcgcatcgggggtatcggcccctgtggccgccagctctgctgctcctcttggatgacgaccttctcctcggtgagtacgggggctgcccgtgtacaggatatcacgatgaatccgcagaagctcacggggcagtgtgggaagatcaagtgctgtatgaacttcgaggtcaatgcctatgccgaagctcagcgcagcctgcccgaccgtgaggtcgtcctcgagaccagctccgacagctactatcacttcaagaccgaccacttccagcgtcaggtcacctatagcacggtgcgcaatgcgccggtacgtctggtgacgatctccgccgagcgcgcctttgaggtcatcagcctcaaccgccgtggcgagcgccccgagcacctcgaggccgacgcaggcgaagagcgtcgctcctcgcgctccagcgatatccttgccgacaacagcctgacgcgcttcgacagagagcgccgtggtggtcgccgtggtggcgactctcgtggtgcccgtcgtggcggtgaccaaggcgctcgccgtgagcgctcggctcgccccagtgatgaggcgagtaggggcaatggcggagagcgtccacaggtacggcagttccgtagccctcgcactcctcgcacggagtccaccggtgagggtgggcagcagcgtatccgccgtccacgtcccgagacctcaggcgaagacaagggatagatgcgcaccccttcactacattactatatagggcgtccactacggtgtgcactcctcggcctctccctccttctccccctcgtggggtgtcagcaggagacgggtggagcgagggagtactatgccttcgagcagcccgctggtggcgtgtggaagccccgcacgacctatagctttgatctcctcttccccgatcgcacgacgaccttcactggtgagatcgtcctgcgtatggatagccgtctcgaccgccctcgagcgcgtatggaggtacggctccgacaggatgagacgatcctgcggcgcgacacgctgcaggtagacttcgctgtgacggctggagattggaagcgcccaggggcgctgtaccacgagttcgtcctgcctttggcacgccctttgcaagctccctacacaggcctcttctctctggaggtgcgtccgctggataccatccccctcagtggggtggctgctatcgggctacacaccgcagagttacgaggcgagtagtagctgtaatttagatataggcggtaggggaatatgccccgacgaccgcctccacacctctacacatagaatgagcaaacaaaataaatctgacgaaatgtcacccgaagaactgcaagcactgtccctgcccatattgggtacctacgaggaggatgagaccttcgcactgaagcccgaggaagaggcgaaggagttccccctcatcgccctgcgcaatatgtccatcttcccaggtacggtggtgcccatcctcgtgggccgcaggaagtcgatgcaggtcatccgacagtcagagatacgtgagcgctgcttcggtgtcgtcacccagcgtgacgccaatgtcgaggacccccagctcagcgacctcttcacggtaggtactatcgtcgaggtctcccagatcgtcgagctgcccacgggtgagctctctgccatccttcgtggtcgtcagcgcttcagtctccagcacctgaccatggacgatccctatctcatgggtcgtgtccacctgctcgaggatagcctccccgcagcagataaggaagaggagtacaaggtgacggtggagctcattcatgagcgtctcttagggctcttggatcgtctggcgccgaatgcccccaatggcttccgcgacacgatccgtgggctgaagaatcgcgcctatatcgttcatctggcaggctcactccttcagctcagcatggaggaccgtcagaaactcctcgagatggatagtatctacgaccgtgctgtctatgtgctcggtcgtctgcatgaccagatctctgagtcctcgctgcgtgaggagatcctcaatcgcacacgccgtgagatggatcagcagcagcgtgagtacttcctccagcagcagatgcgtaccatccaggaggagcttggcactggccccagcgccgatgacgagatcgaagagcttcgcaagaagggtaaggaaaagctctggagcgaagctgtcgctgagatctatgagaaggagcttcgcaaggctgaacgcctcaatccgcagagccccgacttctcgatccagatgcagtatctacgcaccatcctcgagctgccttggggtgtcttcagtcaggataacttcgatctcaagggggcgaaggagatccttgaccgcgagcactatggcctcgaccgcgtcaaggagcgtatcctcgagcacctggcggtgctgaagctcaagggcgatatgaagtcccccatcctctgcctctatggccctccaggggtaggtaagacctccctcgggcgtagcatcgcagagagcctcggccgtaagtatgtgcgtatctccctcggtggggtgcatgacgaggctgagatccgtggtcaccgccgtacctatatcggtgcgatgagcggccgtatcatccagagcctgcagaaggctggcacgtcgaaccccgtcttcgttctcgacgagatcgataagctcgctgacgaccacaagggcgatcccgcatcggctctcttggaagtcctcgaccccgagcagaataccgccttccacgataactatctcgatatcgactacgacctctcgaaggtcctcttcatcgctacggcgaataatatctccaccatcccctccgccctgcgtgaccgtatggagctcatcgaagtcacaggctacatcgcagaggagaagctgaagatcgccgagcagcacctcgtacccaaggaagccaaggagcacgggctcaaggtggaggacatccacttcgcccctggtgccctcgatctcatcatcgaggagtacacccgtgagagcggtgtgcgctccctgacgaagcagatcgctgccgtcatgcgtaagctcgcttgggctaccgcagctgaggagcagctccccgagtccatcacccccgagctcgtacgtgagtacctcggcaagaccgtctattcgcgcgataagtatcagggcaacgagcacgctggtgtcgtcgttggtctggcttggaccagcgtcggtggggagatcctcttcgtcgagagcagccttcagccagggcagtcgggtaagctcatcctcaccggtagcctcggtgatgtgatgaaggagtctgccacccttgctctcagctacatccgtgctcacgctacccagctcggtatcgacctcgagacgctcaaggatcaagagatccacatccacgtacccgagggcgctatccccaaggatggccccagcgcaggtatcacgatggttacctcactcgtctccgctatgacccgccgccgtgtgcgtgcccacctggcgatgactggggagatcaccctgcgtggtaaggtccttcctgtcggtggtatcaaggagaagatccttgccgctaagcgctcaggcatcacggatatcatcctctgccgtgagaacgagaaggatatccttgagatcaacgagcactatctcgaggggctgaacttccactatgtggacgagatcaccgaggtcctcgacttcgctctgctcgacgaaatcgtggataaggcaaagtagactaactttgtagctctatggaagcccgtatcaatagcaccgagcaggagtgccgtaccatcctccgtacctgtcgggagctcttcgcgaagaagctccacgactacggtgcggcgtggcgtatcctccgcccagagtccctcacagatcagatctatatcaaggctgagcgcatccgtggtatccagatgcgcgggcatgctgccgtcgacgagggcatcgagcctgagttcatcggcatcgtcaactacgggctcatcggcatgatccagctcgagcgtggcgctgtctccagcccagatatgagcgtggaggaggctctcgaggcctatgatcgctgtgcggagaagaccctgcagctgatgctcgccaagaaccacgactacggtgaggtgtggcgtaatatgcgggtgacctcgatgactgacctcatcctctcgaagatccatcgcaccaagcagatcgaggatctgcagggcgagaccttcgtctcggagggcgtcgaagctaactatatggatatggtgaactacgccatcttctgcctcatcaagcttaccctccccgccgcgtgatccatgtgcgtcataccctcgccgaagtagcccgcgtcatcgtagggctcgtcttcgtggcctctggccttctgaaggccgtcgatcccgtgggtaccgcgctgaagatctcgcagtatctcaccccgattctcagccctgcttcagcgggtgccgagactattacgctggcgctttccttcgtgctgtgtggctccgagttcctgctcggggctttcctgcttatgggggtgtaccgcaagttctgcgctcgtctctccgtgctcttcatgctggtgatgacggccgtgacgctctacacgctcatcgctaaccccatctccgactgcggttgcttcggtgatgcgatccagctgacccacctggagagcttccttaagaacgtcgttctcctcccgctctccatcctcgtcctgcgtgatgcccgagcgctacgccacctctattcgcgccgtgagcgctgggtgcctgctgtgctcgctgtcgtcgggattatctacttcatggcggagaactaccgtcacctgccttacattgacttccgcccctatgccgtagggacgaacctccgtgaggccatcgcaaaggaagaagcctctctgcaacgtgtgctcctcggcgctacgaagtacatctactcaaaggatggcaagacgaaggctttcgaagcctcggccctccccgatagcacgtggacctttgtagaggcgcgtcaggaagcagacctggcaagctacaagcctcgctacgacttcaatcccatcgatagtctgggtgagcccgtcatctcgacgctcctcgactcccaggggatcacgctccttctcctctctccctcgtggcgtacggcgagccaagccgtgcttgacgagatcagcgaactccacgaagaggccagccgcttaggctatcccttctatggcgtcaccgcctcgacgagcgaagaaatagctcagtggcgttatcttacaggagcctcctatccgatgctccagctcgatgccactccgatacgtaccatcatccgctcacagccagggctcgtcgtcctgcgtgacggtaagatcatcgataagcgcgcctacgctgacttcccctccgtcgagggcgtcagcacttacctccgtagcctgccccagatgcagcctcacggcccctctgtgacgcgcacctacctcctctgggcgtgggctgcactgctgctcttagccttcctccgcttttgggcgagaaagctccacctcaccgtccatctgcacatcaagaagcgtttacatttaaccaaataatcctctttatcaaagtaacaatgagaaagaatatcgtcgccggtaactggaagatgaacaagaccctcagcgaagggatctccttcatcggcgaactcaaggctgccctcgctggcaagtccctccactgtgacgtcatcatcggtgcccccttcatccacctcgcatctatcgctaaggaagctgaaggtagccccatagctatcgctgctgagaactgcgctgacaaggctgaaggtgcttacacgggtgaagtctctgctgcacaggtcgcttcgacgggtgcacgctacgtcatcctcggccactctgagcgtcgtgcttactaccacgaagacggtgctatcctcacggataaggtacgtcttgctctcgctgaaggcctcgctcctatcttctgcatcggcgaagtcaaggaagagcgcgaagctggcaagcacttcgaagtcgtagagcagcagctcgaagaagccgtattctctctctctgctgaagacttcggtaaggtcgtcctcgcttacgaacccgtctgggctatcggtacgggcctcacagcttcctcggctcaggctcaggagatccacgctcacatccgtagcctcatcgctaagaagtatggtgctcaggtcgctgaagactgcacgatcctctacggtggtagctgcaatgctgctaacgctaaggaactcttctctcagcccgacgtcgacggtggtctcatcggtggcgcttcactcagcgtagagaagttcctccccatcatcgaagcgttcaactaacgctccctccctctttagccaccccttccctgtgagggggtggctaactcctttcctcacacgctccccaacccctcagcgaaactcctatgctcagacgcattcagctcacgcttgcgctcctcgtcacgtgcctcaccttcgccgcgactctctcggcgcagaccgcacctgagaagctaagaccacgcaatatcctcgaagccctcgagcagatcaatcccggtgagggcttcgtgacgatcatccaagaccccgacctccgtggtgtcatcggcagcgctcccgctccccgtggctcctcggtgctggctcgtgatggcaactattccatcctctacggctaccgtgtccaggtcttcaacagcaacctccccaacgctaagagcgaggcttatgctcgtgccgaagctattcgccgcgtcgcccccacgctcagtagctacatcaccttccgcgctcctttctggcgcctgaccgtcggtaacttcacctcacaggaagaagctcgctcggctcgcgctcgccttatggtcgctctgcctgcttggggccgtgagtcctatgtagtccgtgagaaggtccgcatcctcaactacaccgaaccccatgcctcagaagaatagcctccccgatccgtcgacactcaccttcgtctctgagagtgaagaggctaccgaagccgctctgcgccaccactaccacgagatcctccgcctgctgggcgaagatcccgagcgtgagggcctggtgaagacacccgagcgcgtcgccaaggccatgcgcttcctcacctcaggtgctcacaaagacccgaaggagatcctccgctcggcgatgttccgtgaggagtatcgtcagatggttatcgtcaaggatatcgacttctactcgctctgtgagcaccacatgctgcccttcttcggtaaggttcacatcggctatatccccaacggctacatcacggggctctcaaagctcccccgcatcgtcgacgtcttcgcccgtcgcctgcaggtacaggagcgtctgacgacgcagatcaaggactgtatccaagaggcactcaatcccctcggcgtcatcgtcgtcatcgaggcacagcacatgtgcatgcagatgcgtggcgtagagaagcagaattccttcaccacgaccagtgacttcaccggtgccttccgcgaggctaagacgcgtgaggaattcatgcagctcatcacgcacagccgccgctaaggtatagcccgtagcatcccctatataatataggtacgctaaaagcgctcgccccagcgatcccgtatggatcgctggggcgagcgcttttagcatagtgtatgttgtgcgagcggcttttacttcgagggctctgcgaagcggcgagagcgagcgagcatgcaggcaccgatgagcccagcgcggtcgccgagcgtagccgtacggatctgcgtatcgcgcgtcacgacgctcatcgaatagatgcgtaccgaggcctcgacctgctgggtgaggtagccggaggcatcagcaaggctaccaccgatgatgacgagctcggggttgaagacgttgatgaggttcgctacctgcttaccgagctcacggcccagctcgctgaggacctgcaggcagagcatatcctcctgagcgcaggcgctgatgaggtcagacatacggagctcacggcccgagtggacgatggatgagaggacggagctctcaccagcacgaatgcgctcctggatcttacggcacatagcctgaccgctgacctcggtctcgaggcaacccttcttaccgcagtggcagaggatctggttgtcgaagacggagatatggccgaactcccctgagaagcccgacttaccgaagtagatctgtttgtcctggatgataccgagaccgagaccccagctgatattcacatagaggacggagttgacctccatatccttagtgcagcccgcagtgaactccccgaaggccataccgcgcgtgtcgttgtcgatcgagacgcgcagggcgagcttgctgctgaggatctcggagagcggacggtcgccgaagaagttgaagaggctatagctgtgacccgtgacggggttgatgcgcccagggaggttgacgttgatgttcaggatctccttgggctggatgccgtggcgcgtgatgaagccacggatctcacggcagatcgtctcgagggcctcgggggtattctcaagcgtgtagggcaggtcgtagtccgcgcatatcagctcgctctgcaggttgatcagaccgatgtgcatgcccgagcgcttgatatctacgccgatgaagtagcccccgtcggggttgagcccgaagagtagggggaagcgcccgacgccgatctccagcttaccttggctctggatgcagcctccgtcttggaggtcttggaggatcttagaagctgtggggacgctgacgtatagctccttggctatgtccgtcatcgtggccgtcttgttgcgcagcaggtaattgatcacacggagcttgtgtagccccttcttggtctcctggctgaggtcgtcaagtagtttgggtgtcatgtggagtctggtactgaggtgagctatttaggcttcgcctttaggtggcgtagatccctgagacttgcggcggttgttggggcgcttcttcttacgtgcaccctgggctgcgccttcacccttgggggcgtcgcttttgccttcggggcgctggccctgctgtgagctgcggccacgtccgcgaccaccgcccttgttgccttgccccccgcggggagaagagctaccacggccaccgcgctcggggcgacggcttgggtcgtaggcgggtgtggggccgaaggcctcatctactgggatcttatagatttccttttcgaggaagtcttcaatgcgtccgaagccaggctgttccttctcgctgacgaaggtgatcgccagcccctcatcgttgccaccacgggccgtacgaccgatgcggtgtacatagtcctcggggtcgtgggggatgtcatagttgatcaccatgcggatgttgtcgatatcgataccgcgcgccacgacgtcggtggcgacgagcagatcgatattgcccgacttaaagttcttcatgacctcttcgcgcttctcctgcgtcaggtcggagtgcatctgctcgacgcggatattcaggcgtgagagggcagccgtcagctccttgaccttgagcttggagctggagaagatgatcgtacgtgtagggggtgtttcgcggaagagctgcgtcaggatgggcagcttctggcgctcatagcagacataggcggactgcacgatgctctcgggcgggcgggagatcgccagctcaacctcggcggggtcgtgcaggatcgtgcgggcgaacttcttgatcttcggtggcatcgtcgccgagaacatcacgcgctggcagtcctttggcagcgcactgttgatctgcatgatgtcctcctggaagcccatatcgagcatgcggtcagcctcgtcgagcacgaagtacgtcactcccgagaggtctgcctgctggaggttcatcagggccaggagacgccctggcgtggcgatgacgatctccgccccgagagccataccgcggcgctgctgctcccaggcgatcccgtccgtaccgccgtagatagctactgaggagacggggaggaagtaggcgaagccctcgacctgctgctcgatctggatggcgagctcacgggtcggagccatgatgacggcattgaccttcttagggtcgccctcgccacggctcagtcggttgatgatgggcaggagataagccgcggtcttacctgtacccgtctgggcacaagcgatcatatcgcggcgttcgaggagaagggggatggtggcctcttgtacgggtgtggtctcgaagaagttcatcgcttcgagcccatccagcacttcgtcctcaagatctagttcgtcgaaatacattgatgctgctatgttgagttagaggcaaatatatagcttttcccccaatatcttaataagtctacgccccatcctaaaatattatcccgaaaaagccccgtatttctaaaagtccttcgcagtgcctcgcctccggcagccccattggggcgctctatgtgctgggaaggatcgtccctcatccctatagaagcgtcgcggggcaccccattgaggtaccccgcgatagctcctttgttgaagctactcttactgcccttatagtggcagtgagctatggttgctggagtagcttctccgtagagaagatgctcgctactcgccccttctcgaagagaactaagttgaagtgctcctcgtcggtcgagcgccccgtgagatccttgacgaaggctttgtagaagctgtcgtgccacttcgtcccgtagtgcgtgtagtcgatacttagaataggctcggtgcgcttcagaagtccaggcgtgaggtcaatggctacatagtagggctctgcaccgatcttatgcgcatacgcccctatggtactcaggggaagacacgcgcttgaggtgcagccgtcggtaaagatgtagaccaaggccttaggcttggaggcgagtgcagctcggagctcggtaccattgacgcagaggatctttccctctcgatgtaccctatcgagggtctcgtcgaggtcacggagcttattccgtgagaagacgatccttgctcgctcttcgcggtctaagtactggtagcctgatgtgagcccgtagacttggaggtaccccgtgagatagaggccgcctgctgcgatgacgaggatggcaagtgctaccccaatgccacagagtattcgcttcactgtccgatgcatgagaggtggaagaattaatgtcagctgggctatctaagaaggtgatgaagttcgtgctcgctcttcatagtatcaaacccgttggatgaagattataccactcccagcaacatatactgatgtggtattccgctacgaatgtacaaaataatggccgtggaataggtgcgtcgtgtagagctatatagtatggcgaagaaagctatatatctttggcctgattcctatatagctttcggtgcgaagctatatagctttgtactgatccctatatagcttttgtgaagtgacctatatgaggttgttgctctgcgcagggataaaagttgtggacgagtggcagaaaagtttggactacgtacgtggctctaatatctacgtgcgtggatatttggactgacgtgcctggtctttaagactacgtgcgtagacataggaaaagcactatgtgaaggcgcttttttcttcacgagaacgacgctttttcctccgctggataagaggaatacttgcgatagggcgaagggcttgcgtatcacttcggaggggcatatcggggaggggctttggtgatgaggagagggggcgtcgtgggttgatggtgctggggaggctaagggacggagattgcgtacctttggggggaagaaacgacttacatatatatgatacttaccgatgactggttcaccagcgtgagccataccgagggtggggcgatagtcctcctgacggtccgcaagggcctcactcagttcttcgagagcggcaagctccgtgtgcgtgtggatattgcatggccttacaccgccgagcccgatgggatgcccgacgaagagactgcccgtctcatcgaagacattgagcccaagctccgacggatcatggagcgggacaagctcgccatcctcacgggcaactataccggcggtgggcagaaggactggaccttctacacgcgtcacctccctacctttggtgagcgtctgaatgaatgcctcgcaccttatcccacgcttccgcttgagatccactgcgaggaggaccccgactggagcgactaccacgagatgctggtgctcgagactgacgactcagacgaagactaagcgatggagcagctcttccgccccgcttcggagcctaccgatcgcctcgtcctctacttcaatggctgggcactcagccccatcgccgtagagcacctcggcctccccgaggggcaggatctcctacttctctgggactaccgcaccgatgcgctggacttcgacttctcgccctatcgtgagatccgcctcgtcgcttggtcgatgggtatctgggcagccgaccgcttcttcgctaagcacgaggagctccgcagtcgtgtcgtctcgggtacggcgcttgcaggcacaggctaccaagtcgatgatgccgtgggtatccccgaagccttcttccacaagaccctcgaggggctgacggaggagaatcgtgagcgcttcgaccggcacatgctcggtggtaagacctaccgccacctctatgaggaggtgcgccagcgctctacggaggcgctctatgatgagttcgtccgccccttcaccgtcgaccgcgatcagccccgcccgctgcctaagcccgcagctttcggtctgtggagcaaagccttcatcggcgaagacgaccgcgtcgtccccccgacgaaccaagagaactactggcgcatccaaggcgtgccgttcacgcatctgccgaagacgccgcactacctcctcggccacttccgccgctgggaggagctctggtagcccaacttctttccccttttttagctttaagacggcatcaaaacctgtgttttgatgccgtctttctatagctgcgtctcctaatctgtagagaaagatctgctaaagaagtataacctatgaactgaaagggcatatgttggtgctatctttgccgaagtaatagatgacacagctatgggaatcaatctaatgaacaagtatgtctggctcgttgagacgatacagagggctggggagatctcactgaaggagatccaaagcaaatggctcgactctgatctgagtgagggggtagagctgtcgcagcgtaccttccataagtggcgtatcgcgacagaggagctcttcggtatctgtattgactgccagcgtacaggtggatataactattatatagccaatgcggaggtgctcaatgaggggggtatccgtagctggctcctgcgcacggcatcgctcaatcaacagctgtcgcgtagtatgagcttgaatgagcgtatcctcttggaggatattccctcgagcgagacctacctgtcggatatcattcgggcgatgaaggccagtcgctgcatccaagtcaagtaccgacgctacacaagtgcgtcgtcgcgcatctcgatactcgagccctatgcacttaagctctttaagcagagatggtacctcttggcaaaggcctcagatatgccctatctgctcctctattcccttgataggatggaggaggttgtgcttactgagacaaagttccagctaagcccagactttgatgcggagaccttcttcgaggattgctatgggacgatcattgatgcctcggtagaggctgagcgcatcttgatacgcgtcacctcctctcaagcctgctatctcaagtcacttcctctacatcatagccagagactcttatccgaggatgaggagtatagtgttttcgaactctatctaaagcctacgtatgatttcctgcaggcactcctctcgtatgggagtgagctggaggtgatcgcccctgtatccctacgcaatcagatgcaggaagaagtagccgctatgatgagccgttatcgataaagtagagccttatgaaccagcccttagatacctattttggccctcaatcggagtgtatccgtattgactttgagacctcgcctgggtggggtggatcgtatgtcgatatagaggtagaggctgatccgaatacctacatccgtgtcacttggggggatgctcctgctaagatctgccagaactatacccagagtctacagctgacgcatagctacccgagctacaaccaaggtggaggtattcacttcaccctatgtctggagctccaggaaggggcgcacttcatcggcttgaagaccagggagcgttcggtattcctcgatactctccgactcgatgtgagccattgccctcatctgaggtatctacagtaccaaaagatagaggagcttcgcttacccaagagatgtatgctgaccgacctgaagctacgtgaatatagaggcactcatctggacttgagtggggcgcacgatctcgagaccttcgcctgtacttatagcggagccttgcagagcattgacctgagccatagtacaaagctctacacgctggatgtctgttattcgcctcatattcatacgatcaagctccctaatcgatgcaatctaagcgagcttcgatacaatgtctttgcgctcaagcctacagcactggagtatgtgcgcgatatattgcgtagcaacaaaggggaggaagtgatcgaggtattcctatcctaccggacacctggagctaatcccgacttcaaggataaagactggtacgagcaactcatccaacagaaggtacgaaggattaagtacgagtagcaggtaggactatatgctttttgagggcaaatgcgttgatgcatttatagtcttatctttgctaagacgaatcagaacacaagtctatgagtcaagagtctgtttatatagcgagcgtcgacgaacttacgggtacccgtaaggagagtctgcgtcgcagactctccttataaattccctaaacaccctaattatatccagcacgaaccctattccgagcgaatagggtaggactcttactgtccctatatccaggcagtagagagattatagcaacctctttacatcaccctcagaacataagtaattaagatgatgacagcagaccaacaagcttttgcggaatatctccgccagaccgagcgcacgatagaaacccttccagctggctattgggaggagatcccctccaatggctacgggatcaatagcgagcgacgcacgcgcctccacctccagtcacgcccctacgactatccagagctgctggagacctgggtcggtaccgatcctgagaaagcacaggccaccgtactgatccgccaggatatagaggtgactcatcgccgactcgcgcagcatccgtggaggaaaaccctcctgcagggcgaagtggacttctccgatctccgccttggggagtttgtcttgcgcctcccctcaatctccgaatatagagagagcctaagccgtcagggggtgcgcgtggctgatgtcaccccccgcaccattcgtgatatcaattatgccctggtggagacggctctctgtgagcgctaccatctgagtgcccgcacaggtcgcaacttcatcggcaatgctctcaatggagtcattcacgaagacctcgcgggcttcgcctacatcgtccctcacaatacccacgacgagtataagcaccgtggctacgtggagtatgccttaagaatgctgactaccccagccgagtagtagatataatgtctcacaactaatagatacccttccctatggaatcactcaatcgcatcatcgagatcgccgaatcgcttgagcaaaagagcatcgcagagcgactacgagctatcgacgagcgcacacagaatccttcagctcagcttattctccctctcatcggggagttcagtgcgggtaagacgagtctcatcaatgcgctgaccgatagcaaggtgctggagatcgcttctcgccctacgaccgctaccctctatcagatcttcttcggctctactgagaataaggccgtcgccctcaccgcagagggtgaaagcgtcgagctacagctggattcaatgaagaatgaagagctgctgaagtaccctaccgtcaatctctttgacacctcgacgaaggtgcccaaggatatcatcttcgtcgatactcctgggctctcttctccagatccgaagcaccgcgaagtcttgattagtatcctcccccgtgtcgatgccatcttacttactgtggatgccaatcagcccatcacgcgtagtttgctggctttcgtgaaggaaatgcgcttagccgagaagccaatctatctgatactgaataaaacggatacgaagtcgacgggtgaactgcaagatctcaaggcggggattgcccgtgatatcgacctccctattgattctatagtatgcacatcggcttctacgggtggcgtcagcgaactgcagcaactccttacgaagatccaggggcagaagatgcagatcattgcgaaggtcgatgccctacgtaccaaggaactgatcggcgaactacgctccttcatcgccgaaatccttcgctccagctcctctcccaaggaattgaaggaggctgtgcgtgcccaagagcgtgagctggagcgcctgcagagtaatatccgtcagctgatggagcgcgtcgaagagaagctctcggacaaggtcgatgagacacagagcagtctgcgtacccagctgtggtcttcgctcaatggcatcctctcgaagaagggaatttcttacaatgatgcaatcaaggcggaggttattaacgtcaagaccatcctcttgcagaacttcactcgtcaggtggctactactatccgtgaggtgaatgcctcaagtcgtgatatacacgttcagctcccttcggcggagaccatagacttgagtcagctgggcgaacaggcgaatgctatccagatggaggactttgattcggttggacacgaaaatgataaggcgtttgggtggatcgctaaggggctggctattgcggctgctgtggctagcgtagctgctacaggaggattcagtgtcttggggctgggaggcgctggcaccgctggtgctgctggcgccgctggtgccgctggtgtcgcaggtgctgccctcgaggtcggggaagttgcagctgtggccacgacggccgttaagaccaccaagatgatgcgtatgatgaatgtgatgagtaaggctgggagctttattcagaagggacaccagatatcttcggtagtctcctctgcagcagagaaggagcgtggctttatcgaaggtttggtaggtaaagcgactgagttcttcagtaagccccgccgtgaagctgccgtagagcacttcttggatgcgcagatcttgcccaacttcgaggcggacttgcgcaactacctctccgaatccctccgtctcatcgccgagcaaatgaatgccgaagctgctaccctcgttggtgagaagcgtgaagccctctcccagctacaagcccagcaggaacaagaacaagcaaagtatgaggctgagatcaaggcgatgaaggagaaggatcagtatctggctaccttctcttgctaagtgataactaatggaaaagactaagaatatgacagaagcacttattggaatcggtattggactagtcgtcggtgctattctcaaggataaggttctcccagcaaagccaagcgatggcgtaggtacgccttctcccgaagcacaggaaatggcttcgaaagagatcgagcggctgcgtgagcgactcaagactcaagatcagcgtatcgaagagctgaatagccgcttgcagaggtcaaagcaggaagcgcgtagcttggaaggcgaccacgatgatatcgaggaagagcttgaccaaacgaagaagcaactccgtcgccttaaggaagagcatacgactgccctccgtgacttggctgaatacaaagaagcttgtgagctgctgaataaggagctgcaggagttgaagcaacagcactaatctaatccatccccccagcctatcctatctcgtagagcttgggctggggggatcattattccgatctatgtttgactttatactacgttggtttgggaaaggtaagccaaaggaagatacctctacccaagatcaatccttgtcactctttgaaggaagctcactcttcgccacggataaagagagcgaagcctctcctgcgccagccgaagaaacggagcgggtagtaactccttcttcgactccgcaagcagactcagcccttcaagcaaaggtggaagagctgacggcacgcctggcacgaacgaagaaagctctggagaaggccgaagaagaaaacgaagagctcgaggataaactcaagcgtgataagcgtgaggctgaaaagcgtgaggctgaaaaggcgaaggaagcagaggagaaagtctcggcgaaggagaagcaactttcctctctgcaagagacccttgacgagacgacggaccgagccaattgccgagggcaagccttatcgttcgtacgagaggtgctgacagctcaggtcacttccgaacgctccgagctggagcagaaggtcgaagagatcgtctccttcattcactccgatgaatgtcgcgcgtacatcacgctcacggatgaaggggagcgtgacctctcgatgtggcagtctgagtgtgctaagagctggatccaaggtaaggccaaggtggcttttatcggggagttcagcgcagggaagacgagtatcgtgaaccgactcctccaggatggagaccctcacgccatccagctccccgtgagctccaaggcaacgacggccatcccgacttatatctctgggcgtaaaggcggtggtaaagctacgtatcgcttctatacgcctgactccatcctcaaggagatctcggaggataccttccgtagggtcagtaaggaggtgctggaggaagtcggtggcatctcctcgatgatcaaatacttcgtgatggcttatgccaacaagggcttagagcgactgagcatcttagatacccctgggtttagttctcaggatgaggtggatgagcagcgtacgatggaggtcatcaacgagtgtgatgccctcttttgggtcgtcgatgtgaatagtggcacgctcaatacgcgctccatttgtgtcatccgccagtacctgcacaagcctctctatatcatcatcaacaaggtcgataccaagtctccgtcagaggtgaagcaggccgagcaggccattcgtgcgacctgtagcaaagagaagctcgaggtgaagggcttcatctatatggggatgaaaactcccctggatgagctgcatcaggtcttctctacgctgggctcaagcagtagtttgggcttgcttgaagccttctcacagcgtattcaagagctgatcgatgagcagatggacatcaagaaagagtatgatgacaagcaacatcagtatcaccaagacttgagcgagcttgagacgacttttagtaataacctcgatacggtagccgaactggcggaggaagctgctgggatacctcacttcgagacgcacttctttagctctgattgctttgagatggatgtcttagagtacagggatctggaggagaagctgaaggtactgagcaaggaagcccctgatatactaagggggaatgtcgagggtattaaggaggctgtgtcaaacatcctaagtatagaagacgaggctgacacgtgtcggtcgatacttgccgatctggaaggactacagaatcgattcactcagctccgtgagcaaatagaccaactgagccaactacatagataatacccatcaaatcaaataacaatggatctactcaaagaaatttgggagcgcaagcagcgactcctacagctcctccagcgagctaaggaatatggctggatcgatgactccacgctgaaggccgagatcaagcgtgccgaggagcaaaagctgacgataggtgtaatcgggcagatgaaggcggggaaatcaaccttcctcaacaccttcatcttcggagatactatcctgcctgcagcgaccagtccgatgaccgcttcgctctcctacatcacctacgggccagagaagaagctcgtggcggagttctataccccagatgaatgggcagagctccgtaatacggcacagcttcccatagaggaaggacaggagtcgaccgctcaaggatctaagatcaaggcggctcaggagctggtcgccaaggctgggaaaatatcccagatcaatagctttttggggaagacaaaggaagacagcttctccaatctcatcgactatgtcggtgctgatgggaagtatatcgctatcaccaaggcggtcacgctgtactatcccctggagtacctcaagggggtggagatagttgataccccgggattcaatgacccgatcgtgtcccgtgaggagcgtacacgccaatttctcaagcaggcggatgtatcgctcttgctcctctatgcaggtcgtgccttcgacgcaagtgaccgcgatatcctattcaaggatgtccgtaactgtggtatcggcaagatcctcgtcggggtcaataagtacgataccatcgtagctcagggcgagactccagcgggaatcacccaaaacacggagcaagccctgcgacaagctgcgtatgaagtccaagatgaagccatcatagagcttgtgcaggagacacatcctatccccttctctgcggagatggctctgctctccaagctcccaatgagccgtatatctaaggatgaaaatcttatgtttcactacaagagatactgcgagacctttgagatcagttcgcagtctgagctatatgagcgtagccttgtagagtcgctcaatgaggctgtccgcgatgtcatcgagcgagataaggtggagatcctcttgcgcaagccagtcaatatgattcaggctgcagggaataaacttctcagtgatattcagaatgctctgactctagccgagagccaggtgaaggtcttagaaatgcctgacgacgaactggaggatcgcgaagatcagttagctaaagcagagcggaagctgaatcgtaagattgattccctccacgagtctctgaaggagctcattagagaagagacctatacctttaagacaaaggctgaggatgccctggatgatgtgattagggcatctaaagatagggctaagaagatcaattactttggaatgggcaaagatgcagcaggctcggatattcaaagtaagttctttacgttggagaatagaacccttccacggctacagaacgctaccttgaacaagatgagaactaaggggaatcgcgagctgcaagacttcaaagttgacgttgaagatatcttggagcgttatctccctgatgatgtggatgtgaaggacttaatcaagagcttgtcacgtttgcttggagccgaggataaggatcaccatttcagtatagatcagagggtctgtggctttggagactcaagtttcggcttcttcgcagacgtggcgattgcatcgctcttcccattggtgggtgtattcaagggcgtcaatgctctattcgggggcaggggacgggaagtccgaaaagagctcgtggaccaacccgatgatatccaaactgcaatggattttgccccgatgcgacagcaactgatggagttattggagaagagaataacctctattcaagagactcttattgatgaactcattgttcccctccagcagcagattgaaatggtgcgcagggataaggccaacaaggccaagaagctcaaggatgcccgcgccgaaatcaagctgcagagcgagaagaggtcaaccctccttgagcagcaacggagcatctctgagctggctacgtctgtcctgaagtcttctgcttcaggtaactaacccccctgctgtagctcgtgcggtacctttgggtacccttatacaagcgaaagagccgccctctgcactgctggcagagggcggctcattgcttatcgtgcctcagctactaagcgccgtggaactcgtattcggcctggatgtcgatcgtcaggtgcgtgaagagcgtctcgatgagctggtcagtgacctcgagggctgagcgaaggacgtggtcggagaaggcttgcaggaggtcgcgcgcatgcaggggctgcgtctggtagatagccagatactgctcttccatctcgcgctgacgctggtcggtctcagcttcgaagtcagcgtagaccttcttgatgatgggggcatagcggttgtagtcgaccatgccgagcgcctggaccttgcggaacttccagtaggcagactcgtgtgaagactcgttcgtccccttcgtataagccttggggtaggagcggatgccttcgtagagggggaggaagacgctgaggtcagccatcccgagcgccacatagttgacgcatccgatagcctgaggaagctcggggcgtacctgtaggaggtgggtctgcgtggtgcggaagatggagacggggcggtagacttccttggggttctgatggaggtaggggtcgtggtccgtgccgtcgtagtggaagcggaagagctgtctgaggcggctgatggagatgggctcggcagcttgggcgaagacggggaaggtgttcttcgtcacgtcgttcttgatcgatgggctcagctgtgcctgcaggccccatacgcgggggtagttgtaggtcgtgtcgagcttgacatcgcggatgtaagcctcgtggaagtcgaactcgccacgcgcagggtcgtacaagccgtgctggatggcgaactcaatgaggtcgtccgaagccagatagttcgcgtgatccttggggtcgtacttgcggaagcggctctggttccccgtgacgaagtactgatcttcggggatgcgggtagcgagccagcggtgccccgaggcagtctcaaggtaccagatctcgtggctgtcgacgaagccgacgccgaagccttcggccaccccgtgcatctcgatgagcgagccgaggcgttcgacaccttcgcgagcggagtggatgtagggcaggacgatgttgaagacggagttctctgcgacgccgtcgggtacgagggggtcggcttcgagggcgcggtcgctactgaagatgctttcggtagcactcatgccgacgccgacgctgttgaagccagcacttccccagtgaccgtggaggtggtagggagcaagggcggagtagccaagagctcgcttggggaggtcgcagcggaaggggctgtcgagagcaacgaagcgctcgggaccatggtcggtgtcttcgtagatctcaaggttcttcgccaggacggcgttccagtcctcgctacgtgcgacgatcatagagccatcggaggtgtgctggcgtccgacgatgatggtggtacattcggatgggtagtccgtgtgtagctgctgtggttgggtcttctgtctcatgactctttgtttttcggttaggaacagcgggcaacttgcgttgtcaaatggtactgcaatgttacgactttttgactgacagtgcaatacctaccgataggtatttgcttctctatgggggcttttcgtggagaagagggtgtgcggagatctccgaaaggtgggtacatctatatgtgagggtggtgtgaacctatattggtcgtcgggttgacctatattggtccgacaacgaagctatataggtcgcgatgacgacctatataggatggcgaagaatgctatatagctttggactgcttcctatatagctttgtgaagtgacctctattaggttgttgctccgcgtaggaataaaagttgcggacgagtggctggtaagcttgatccacgtacgtggctctaatatctacgtacgtggatatttggatttacctgcctagtctttaagactacgtacatagacagaggaagagcactatgggaaggcgctttttccttcacgcgaacgatgcttttcccttcgcaggataagaggaatacgcgcgataaggcgaagggcttgcgtatctcttcggagaggtacatcggggagctgggcatgcgataccttagctccctaaatagagtgcaggactctaaggcaaagtctcatccgaagagatcggcggatgaaggccgcgcggtgtatgctccgtcttccgcttaagtgtggggtgaggtgtatggggcggaagaaatatcagagccttttcctgatcgcatatatataatgtacgcgcgcgaatggaggggaaagcgccttgtcgtcgtatgaatttgcgtgtgtatttggaagtttaggtgatttttccctacctttgcactcgcaaaagaaacgaacggccttgcggtgacgcgggtagtttgactttgagagatctttgagataattgatattgacaaacagaagtgtagtaacaaacgtttagggaaaagaagacctaaccgtcaattacgacctttacttaggtagagatacactaataaatctgaagcaagaatcatttcggagcaagacaaacagaacaaagtacaataaaaatattgacaatgaagagttt

SEQ ID NO: 70 - DNA, 264626 bp, Porphyromonas bobii
  source 1..264626: mol_type = genomic DNA
ctggaaggcccatatccaagagggggaattcgctgaagaggagggagtcgttgatccgttcttcgacttcgtaatcactcaggccgtaccaggtctgaagtagtaggatcttgaacatcatcaaggcttcataggctggatttcctgtggcgttctggatctttgtatacttcttgttgagtagtgtgcgaatacctcgccagtcaacgcaagcgctgatctgtcgaaggaacgagtgcttcatgcggtcgcgacgtacctgcgtataaacttgcaggaagctcggagcggattcggtttgtttggtaggcatagcgatacgactgttttggttatgaagatgctaaatatcagaaacatacgcaaatggaataaacctgggtcccctctagtgccgtgcaaaggtctcctaataaggtgattggagaaggcacagccctgacaaaagccaggagatataggtgtggtaggtaggaatacgtagattctttgcgtagagcgtcaggaactgctatgtatcagcctttggggctaaatcgctagcccctgccccgccaaaggatcaccctcgcgaagcaggggactacacgaaacaatacaaatacacaatgtcattatgggcattccctacccaccctttgctctcgatgacggctagctcttgatattctgagcgatccagaggttgaggtcctgcttattgatcgccgccgacatcagctcggggaacttgtccggggtacaagcaaaggcgggtaccccaagggtacctaggaatgctgcgttaccccgatcataggaaggcgaaccatcgtcgttgagggctaggaggacgatcagctgtacccccgactgtaccagccggacgaacttcttgcgcatctcccgctcgttgcccccctcgtagaggtccgtcactaatactagcgtcgtatcctctggacgtgtaatacgctccatgcagtagtgcagagctcggtcaatatccgttcctcccccgagctggactccgaagagcaggtccacaggatcctccatctcatccgtgagatccgctacctctgtgtcgaagacgaccatacgggtactgacggcagggatagaggcaagcaccgaaccaaagatccccgaatagacgaccgaggcacccattgagccgctctggtcgatgcagaggacgatgtccttcatggccttgcgtcgtcgcccatagcctatacggatctcggggatgatggtcttatagtcgggttggtagttcttgaggttcttcgtgatcgtagtattccagtctatctcgttgtagcgaggattgcgacgtcgggaggacctgttgagtgcccccgtgaccgcctgctgggtaggtccagcgagcttcctaaggagctcatcgacgaccttgcggacgatctcccgagccgtagccttgctcttctcgggtatagctctcgatagggacatgagggtagctactaggtgaacgtcaggtacgactccctcgagcatctcgggctctgtcagaagctcatggaggtgaagacgtgatacagcatcccgctggatgacctgcacgacactctgggggaagaactctcgtatatcccccagccatcggctgaccttgggagccgaactccctagtcccgccgagcggtcagagtcgtagactgcctcgaggcactcatccatccgtatctcctccttcgagaggctcacaccggtgccatcggcttcatctccaccgaggatcagtcgccagcgcttcagatattcttcttgcatcatctcttttgtctagtctaatcctaagaataggtgaagtaagggcaggacacgagctgcctcggcatggtccaggggctctgtactcatcccgacactctgggtcgaggagcgcttgccatcatagtgacgagccttctccccgaggttgcgcctttcggctggagagtactctgagaaggtcctacgcagcaccggaagtagctcgtggaagttctccgccgtgataccgcagatccagtcattgaccaactcccagagacgatcctccagcaagaggagcgtggaagaggaacgaaggaagccctcgagccaatacgccatatccagaggcttcatccctaccgagctgtggtaggagagactatgtgcgatctgttcgctggacaagcggtcagcttggttaaggagcaacgtcgccataccagctagcaaaggatgcacctgcgaagaggtacgaagctcctcgaggaaggcgagccacagctccctaagctcttcgtctgctagggtcataagagcttggtctacctcccttagggagttatatagatcgtctgcggctgtttcgtcgatacctgagcaggcctgcaagcccccagctacgctacgtgctaccattacccgtagtataccctctaggtgagagaagtctaaggcacgtacagagccgtagcgcaggatgcgtatgagcttggggatcgtatctagcatttccccgacatcgccagcggaggcagatagctcgtcgagcctcttagtcatcatcgtcaccagccccgggaggtcggcagggatagcttcatctaggagctcggcgagacggcgtatgctctgcgcctccatcgcctgatggctcatgtaggcttcggtagcctgctgtagggtgttgccccacacagcccgctcgatgatagatatgatctgctcgggcttatggtagagctcccattgctctttgaaggtgcccttgcccgagactccccgctctgtcccccagccgatgccgagtagatcaaggcgatggatgaagatactcttctctaggtctagtggtttacgcaggtcaagggttacggtcttgatctcggaggtgaagggcaagcgaagtcgcttctgttgccgctcaatgtccaccaagaggggcaccttaggcacatcatcgggtacagagccaaggcgattaccgatgactagctcctccttgatcagatccagtaggatcggatcgccgaagcccataacggtaatagctgcctgattatagtcctctagtagggcacgtgggtattccttcagggcagcagtagcgtgagccagacgtacggtctcgataacatgtgccacggaggtgtccatattcttccgacgaagatgcttggccatcctactgacccagagcgtaccatcatcctcggggtgataccacagatagtcataccatcctggggaagtgatacctgcaccataaccgctatatagggataggcggtcgtaggtccaggggatccacgtgcaggtaatcttcgtcttgggaagaccctttagtcgttcattgtcttccttgattttgatcttggctcttgcctctagggctggggcatgccatgcgccacagatgacgacgatgacccgatcacctgctcgctcggcctctcgtatctgcttacgcatccacgcttcacgtacgaggtcgtgctcactcgtacgttcggggaaggcctcccgaagggcagtcatagcttcgctcaccgcctcgaagacctctgccccgtcgggactactctcgatacgaagattccaccaagcctccccatccgataagccatcgatctctgcgaggacatcgaaggggtcgggagagataaaggcatcctctagctcttcctcatcggggggaaggactgcgctcacctccacgggggactcttcgtctgtagctgaggtagacgactcggtctgctctgtagggggagtagacagctcctctgtagcctcgtcagtgggagcttcgcttgggcttgcctcgctcgtctcctctgccttcacctctgtctgggctaagcgatagataaggggtaggtcaaagaagtgtagctccgtaccctgagtggctgcgtagagcatcgcctgccattcgggggagaaggctgcgaagggatagaagaccgcattctgaggattcgtaggctcgtaggccaggagagctacggggggcttcatgccctctctagctacctgtcctaggagctcctccgcctcgggtggtccctctacgagtattagatcagggcggagagcctcgagacgctcccgtacacgccgagcagagcccgggccgtgatgcctgaccccaagtatatacgtagccatggtactagatcatgtcacgcgaagcacgatagatgtccttccacccgtcacgttgcttgacgacggtctccatgtattcctgccagacgatcttatcctgcacgggatccttaacgacagcaccgaggatacccgagaccaagtcctcagcatgtagtgcaccatcaccgaagtagccagccatagcaaggccgttattcaccaccgagatcgcctctgccgtactaagtgtccccgtggggctcttgagcttggtcttaccatcagcggtagccccagaacgtagctcacggaatatagtgaccacacgacgtatctcctctagtgcaggcttctctgctggtagcttcatcacctgctcgaagctctcgactcgtctgcgcacgatatcgatctcctcatccagtgtatcagggagtgggaggatgacggtattgaagcgacgcttgagggcgctagagaggtcattgacccccttgtctcggttgttcgccgtggcgatgacgttgaagcctcgtatggcctgcacctcttggttcagttcgggtataggcatcgccttctccgagaggatggtgatgagggtatcctgcacatcggagccaatgcgggtgagctcctctacacgagctatcttaccctccttcatagccttcatgacgggagtctcgacgagtgccccttcgcttggcccttcggctagtaggcgggcatagttccacccatagcgtatagcctcctcgcccgtacctgcagtaccctgtacgatgagggtagagttaccggagatagcggcagctaggtgctcactgacccagctcttggctgtcccggggagcccatagagcaggagggcacgatcggtcacgagggttgctacggctatctccatgaggcgtctgcggcctatgtacttcggggttacctcgaatccgttcttgagcttccccccgaggagataggtgacgaccgactggggtgatagcacccagttatcggggattgggttggtctcgttcttctttagctcgtgaagttcttctgcgaagagttgctcggcatgttgccttagtaatgtgctcatattatacgtatgtagtggttttatttagtctttgggaatgttttgtctagggcggccttcgtctgcatgatcaggagaagatcctctaggaaggctcgcttggatggggtcatatcgggtacatgctctgcatcctctccgtgcaggagattgtagaggaaggactgtacgtcggggtgtagggatagacctatctgctccgtcttcgctaggcgatagtagacgtagcaggcactgacgatcttcaggaacgccagggagaagcgaggcccccacatctcctcaccctccgtgacccattgctcgggtatgccgtggcgagcgttgtacttccgtaggtctatatcctctcgttgccctgggctaagaagccccacgagctcctcgagggtcttgctatcacactgctcctgcagtacccagtaggcccagtgcctgtctcgtagggttacgatcggactagttatggaaaagtaggaggcaaagggtgggttcttggcaagtcgctgggcagccttcatcggatcgctcgtctcgtagaactccatccagaaggtcaggggtacacgctctgctatctggcgcaggatgtagtgctcatcgctctcgcccttgttggggctgacctcggcgatacccagctccttgagttcggggctgtaggggatcggggtatatgaccagcctagtatgcgcccatacttcagctgtccctttaggagctcgcagtagcgtctgacgagctgccccttgggtaggctctcgagaagcgaacgggcgacctcacgcaccttctggctgcgatccttcgccatcacggcggtgaggaactcttcgtcctcttggctaagtcctatactgaagcacgagagcagagcctctctattggaggccgtctcctcacgccaagtacgttcgacaagaggtatcgcagctcgaggatcctccctacgcacctgcttgaggagttgtaggcgagcctgctgaccagatagctcccagtgctctagatctaggggactctcctcctctacctcgaggagcgggagtagccacttacctctattgcccgagaccttgagggcgttggctctacaagctacattgtagccactgcccttcttgagtaccgtgcttagtagctcgtacacatactcggggcgaaggatcagcccctcctcagccactaggtctagcccataggcaagggtagcggtcagcctattgctgagcaggctacgaaggatgagggaaggctcctgcgggaggaagggttgcgtctcctcaaggggctccgtcagtgggtagctcacctcctgctcctcgggcaagagacctgcccgacgataagcgaagaccatcgcagctaagcgatagaaggcctcctcgctgtcctcactcccctgctgtatcttctcccactctgcctgcagctcgggcaggggacaggccaccgccctacctggggtgcccagcagagctaggctaacaagactattcgttgtactactcatactccttggtgtgatactcatgctgtgtgatgcggtagtgcccatcgtaccaaatggagatgagccgccactcgccttcgctgatgatgacgaaggcattgcaaggtcttccgcccgttagggtcaggaaggaaagtccatcctctcgccttatggagacaggctgtcgcctacccctagcgtcatagagtgcgaaggactcgccctctgggcagatccttacctccgcgagacagagagaggtgtgctgggcgaaggggttctgccccatccgctctcgatagtatgccattccctcctcgatactgccaaagctctgagggacaaaggtcttctctgtatgggtggcatcctgtaccaaggctcggctgttgagcactcccttataaaagaagagcttcgcccgatagactactccctccatcaagctaagctccatagacgggcgaccgggcacaatgaaggtcaagcgcacggcatatcgtccactctgcagtccgtagaggtgggcgacctcggtgcggttatcgcccgtgctacgctcctcggtatagaggacaagccaatcatcctccactccttcgccagcgagcacctcatcctgtgactgagggataccgaccattgtcctaagctccacctgccagtcctcactgagggtctctatcctacggtaggcagagatcaagaggtagagacgggagaggcgatcgaggaggagctccttccagccctcagcgttgtagtcgatctcgtagatctcgtagagccgctgggcgacccccgaggcctgcgcatccaccatcctacgtgccatctcgtagatactcccccgctggctagaggctacgtgcatcagacccgtacgcagtagatccttcatccacagctccagctcctgcattcccaccaagatcttggcatggcgattggcctgccgacgctctgcctgcttggggtctttgaccttctcgccctccttcttgcgctcctcacgctgagctttcttctcagctgtctctgcacgcttgtcgatccaggaggtgacccactcgggctcgtcctcttgggcgaaggcggactcactgcgagcatagagcaggaggaggcctagggcatgcttgcagggaaacttatggctagggcatgagcacttaaaggcaatattcgtaaggtctactatcgtctggtagggggatgaccccgagccctggcagtgtccccacaaagctctttcgccacatcgcagcaggggccatttgctggtctttgcctgtccttgtccagccttgacagaggcggcatcgggtgcgagctgtagtatctggtcttcggtaagtctgatggacatattgatgtctatttgcgttgtgtgtaccaaaggtagtgattatgcccgaaaaatctcctcccccaccaaggtactaccgctacctccccgccctctccttctccacccctcgaccctacagatcctgctgataggcctagctccctcaccctcctgcccctatctaccccccctgtgtactccctgaccccacagattctgccgataggcctagttccctcaccctactgcccctatcctcgacccagtactcattgcttgtatcgatcacggagacagctctagctacgggattttgagaggggtgagagaggacacggtatgtccgctgtaatcaccttacataggtgattacgatggtctctgtatgtatgctattccctttctcggcatggtctgttttttgctctaggaatgattgtgacagagggctttggctattggacttattagacctattgcacctatcgagaccattgcgcaaggccatctcttcacagcttgcaccttcttgcctcgaaaattgggatctttaggctgagaagtgggatggctgtctctcccccttgcccccttcccgggaggatcatcctcccgagagggggctttcccgggctatttggcgctctggagcacaagaagcccaggcatacgcttcagattgtatgccatagcctccaagatattctgtgtatgcgttcgctcaagccctcggtagcgacatcgccctcctgaaaaccaccttcgaatactcccgaaggtacgctctatcaaacagcgcattttgctgatggcgttattcagttcacgttgtcgctctgtgagcttcatccccttctgcgccttgagcataatcccatcaatcaagccgtgctcaaagagacaagctgagttcttcttgctacaataacctttatcggcaagagactaacgccctgcgtaagctcagccttctctatcaactcgggcaataccaccgtatcggcacaattggctggcgtggtaattacgctctctaccaacccttgtccatcgatcagcacgtgctttttgtacccatagcgctagtgtctgcctttgcgcacccaacgagcttccgtatccccccctggtttgcgacttttgagttcatactgataagccggctcttgggcttgctcttcttcggtgcgcaagtcctctcggtcgtccgccacttcgatgaggatacttccatcgggagcgtgcgggctatccacaatgctcacatccacgatagccccttggtcaatacggctaatcccgtgcttcttgaactacttattcagctcgcgaaggagcttgtccataatccccaagcgcgtcagttcagcgcgaaagcgacagatggtgctgtggtctggagctggaaggcccatatccaagaggaggaattcgctgaagaggagggagtcgttgatccgttcttcgacttcgtaatcactcaggccgtaccaggtgtgaagcagtaggatcttgaacatcatcaaggcatcataggctggattgcctgtggcgttctgggtctttgtatacttcttgttgagtagcgtacgaatacctcgccagtcaacgcaagcgctgatctgtcgaaggaacgagtgcttcatgcggtcgcgacgcacctgcgtataaacttgcaggaagctcggagcggattcggtttgtttggtaggcatagctatacgactgttttatctataaagacactaaatatcagaaacatacgcaaatggaataaacctggatcccctctagtgccgtgcaaaggtctcttcatatgtgttgtgacaaattcaatgttaccatctccctcctcgagtagttgtgcaacaagacgcttgaagctcgctttatcgtaggctgagatctcaatcttaccaactggcttggggacttcaataggagcatttgcattgagtgcaagaacctcttgaagagtgaacccccaaagctctgcatactcaaagagcttatcgacactggggaagttacctttggattcccagcgtgagacagagcttgaggaaactcccagctttacagcaagatagtcttgcgaaattccattcttcaggcgagtagctctcaggagctcgagtagtttttccatatactcaaagttataaacgcatccgagctcaaccaacccgtttcgtgcaagtttatgcgcccaatgcaagaggtcttgcatcagatgcaatatagatgtctttcggggctgcaatggggctgatataagatagagataggaaaggttttccttcaagagaacacgtcatttttgcccagctacacagtctggtgcacggtgcaagccccttatatatagggcttgcaccgtgcaccagactgtgtagcaaggatctacgtaaacacctataaaagagaagctttgcttatcgttcgtttttctgtacctttgtcaaccgaaaaagagagatgttttacttccaatagccattcagaagagtagtcaagagtcagtcagaaaactgctacacttttgctacactccccgcttgactagattagatagaacctgtcatacaacaacataggtgggatgcgttcatatccctctctctccgcggtaaagggtgcaaatcactagtgatttgcacccttttactatacctaaggaaatgaggataagcccttacccttcttcgctgagatgggtaagggcttcgtcgtggtgtggatgggaggtgggctaaaagcgctgcccttcgctgctggtcttcttgttgcggtaggctgccttgagggaatgaatgcggtaggagacattcaagccggcgcccgagaagtcccgcgcttcgatctcctgcgcaaagatgcctgccatcctgcgcgtcctgtactgcttgttgtcaaggaagaggttctgcaggctgaggtcaaaggtgaagttcccgacctccttggatagcatcaggctgtagctccactgagcagagtactcgctgaagaggtgatgccttctacttgagtagctggcgtcagcgttcacactccagcccttccccagctctacataatggcttgtcgagagctccagcatcgggcgatcgaaggtcaagccactatacttgaggaactgcttttggaatcccacctcaattgatggagagtacggaccgaatgaatcactccaattcagccccagcgagagcgtcgaatagctggggatatttatcgtacgcttgagcagcacgtcggccttcgtctcgtggcgggctagcgctgtggtcgccgtattccgaatgtagttatagctggcgctgaaggacagcgtcttgtacgtgccgaggagctgtagggcatcattggtctcgttgagtaagaagggactaccctgctggtagacgtactgattctcgaggagtgtgaagttattcaaggacgagtacgctgggcggtggaggctcttacgataagacagcgtagcttggagatcttcgcccgaataagacagcgagaaactggggcttaggaagtgaggggagggcttctgacgggtgacacgcgtaccattctgcgtataggaagaggcttcatactcatatcgcaagcctgcataccacgacagccccagccactgagccctcacatcaacgaaggtgcccagtagcgtttggccattcttcaccgtggagctaacgacgtcagtcacgatgccttgctccgtctgctgcagctcattcttattgaagctcaaggccagctcagcgccgtagcccagcttcacccccttgacaggtgtctggaaggacagcatcagggagttcatgccatagcgctgagctcccttggtctgcgcgtgtgccgaagtgcccgcctcgtcgtatatggaggtattgctgtcactccccaagaggatctcatcggtgacgttcacactcgtggcacctatcttcccattgtaatagaggctcgacgtggatttgtagggacgtgaatctatttgcgaggtatagggagtattcaggcgcacgatcccgctctccttgtggatcagtccctcagaagcgacatcgaacttcgcagcacccaccttgagattggagacaaagccgatgttcgtctccttagctgaggatatattcagccctaagccacccataaagaagtcacttcgattgctcatatctgaggagctgaaggtctccaataagtctccactcccattcggcatgctgtagtaatcactattcccactcgccatcgcggtgtggctatagcccgcattgaagctccaataagcccgagcattgctgtgagcgacgttgacaccagtataggtgctgaggcgatgctgcaggagggcgtattgcgaagcagagaggctggtcatattctgcttcttgatcgtgtggatcttgatcaccgaattcgtggaggccttgtactgtgcgccaggggtattgatgacctcgacacttgcgatatcttgggagcggaggtgctggaggatgctcgcatcctgcacccgctgaccatccaggtagagggtagcctcaccacccgtgccgagcacagagaaggatccgcctgatccctgcacgaaggggatgcggttcagtaggttgtcgatcgagccgctattcctgagtgaaggcaccgctgcgacgttggcaacgaatgcaccatccttcagcttgaaggctttgcgcttcgcccgaaccgtcacatcctgcagctggttagtctgtacctctaagatgagctctgcgccttcccgagggtagcggctgataggtcgcagtagatcctcatagccgatgcaggtcgctcgtatccactgcgggactttcccttgctccatcgtgatcaaatagcgcccgagctcgtcggtgaccccgcctgcgatgaaggaggagtcttgcgctaagaggacgatgttcactagggggatcggcgtcttgtcttcggacgagatggcccgccccgagtatatgatctgcgagagcagcgtgatctgggcgcagaggcagcagaggatgatggtgaatagcttcttcatggcttagtggatttactttacatacctccctgtcgctacggcatggctcttgggatcgaactccttctcaatatagtacactgtcgaaatcatagcggagatgtcggctggtcgccaagccgaggtgtggctgaaaggagctttgcgatctcgtccttgtaggacatagacgatggcgatatccccgaaagaatccttgacgatcacgcgattcctccgcttggtcacatagaccctccgtagaaatccacacactccatccatcgtcggcacacgctccgttgcggtatcaaggactatgcagacccagcgccctgagtcgaagttaagctgatagctatacatgtagccgacatcacgcttactatgagtgcccgtgctctttactagggtgaagtctggcgaagcagcgatgatggtgtcctgatctgaatggcattccttgagaatggaggcgatatacgctgcccgctccttcggcagcgcttccttgttcagcgcaagttgctcctccttgaggttcagcaccgaggtagcgaccttgaagacgggctgatcagcgaccttgatcgtgttggtgcttgtgtcgagggtggtttgtggggcaaagcagagtgcctgctgagctccgcatgaggcgagggcgctcacacagagacaggcgaataggctatgaagggctctcttcttcataatcgtgtcgtgagttatggtaagacgtttgtggcgttgactcgatgtcttcagattcagttgtctaccacaaacttagtaaaagatatgcacacaagaaaggtgcaaagaaagagccccctgacgcacggctatttgcatgcgtcagggggcttgctgactataacttgcgaggggagggatagtatcgagccttacagtgtaggggtctctctggtgggcgaattgactgtacgcgagctactgcgcttgatcttatctccgctggagaagtgccatgtcacgcttaatttgaggcgtctacgaggagataaatccgtacgctcgagctctgcaaaatctgttttgacacgcataaccgctctattatgaatgaggttgagcaccccaagattgatctgtagctgatcattcaacaagctcatatagacaccggcatctatatcatagcgtagccctacttcatggctcagatgcttctctgcagtctgtcctgtagccgatagcgttagtcccatcgtattactcaatctaaactgctgggtggcactccaccccagccaagcgctggagacggtcttacctgggctcttctctgtattgtgtctcacaaagaccctattatttgtctgccaaaagtccgacacactggctgtataggagagggaagtatagtgctgtagactcgtgccactattttcgggtctcgtgtacaccacatcggactgcatggggtctcgatgagcaagcagatgtatgatgttcgcaccgctctttagcctataagtcagtatccaattgggattgatgtagtaattcgcctctacagaatgaaaggtttcttcctttagattttggttacctatgctatacagcttctcgttttgatagacagccactgggctatagtagccatagttaggcagcgaatagtctcggcgataagctatagatatacccgactgcttctgcgggttcagcatgtattgcaactggacattgggatacagccccgaataacggttgttgatagacgcaatccgattgagataatcgctatactgcatatctgttagctgataggtcagccctacctgcacgaatgctcgctgaccaatcatgcggctgtactctacccacggggcaaagtcccctccagagatctggaaatcttgttgctttacttgagtgagtattgtgctggcgatacccgacatttcgtttctgtctctcagacggctaaagcgaatccccaagtttacactactccccttgctcgacttcagttctaaacgaggctccacatagaggtaggacagcctctgcctcaattcattctcgtcatgagtattgagctcatagtctatatgatcgctattgctctgattgaggtactcgaccttggtagagaaggaagagtttttcccgacattcagattagctcgatagagcaagcccgcattaccttcgataaaagagctttgggtcttttgtctcagactcagcagctgcccgttgtggttggtttgattgatgcttaatcagatatagccctccataaacttgcagggattgcgtcggagtaagctgatactgtagccccaaattctcgtgaagagccaaggactccttatccgaatgaaactttcgatctacatgatgggtgccgtagttatcttgacgcttgtaccttgtgcgataattccctgaacccagtttaaggttgttatatacagatagcttaccaagctgatattgtagcgtaggagtgaggatggcatctacaaaaccctctccatctgcttgtgcagtcaagccaattgccccaataagtccctccttctgtcgaagagttacacgcacgatacctccttgggcttcttgcccaaaggaagctcctgcattgggtatcacctcgatatgcttcaccatattggtagggatggagcgtaattgctcggccgtaatcttgcgatctccaagatagatgatggtatggtctttaccattgatcaagatatttccactaagcacctcgactccctgtatatagcgcagagtctccatgaggctcttccctttagcaatgggattaccttggatgcgcacagagagatcgcccgagggagaacgcttgacataggagctaagcacgacgacctctgacagttcggtggcatcaccctccaatatgatattacagaccggctgagctgctattgtgcgagccttgtagccaatacacttggcggtgagtatatgctcagacgcagacagcgcttcaaaagcaaatcgcccctgggcatctgtcagacagcctgctacgaaggtactgtccgcacgcttacgcgcaataacgtgggctaactcaataggtttcccttcggcatctactacggtgcctttaatagcttgggctaagagaatttgctcactacagaggagtactacgaggagtaggaagcatttagttagagtcttcatggtgttcaattttcttttgcagacgatctgttgtgtcgagggctgtttgtggggcaaggcagagcgcctgctgagctccgtatgaggcgagagtgctcacaccgagacaggcgacatagactatgaagggcgctcttcttcataagggtatcgtgagttatggtaagacgtttgtggtgtagacttgatgtcttcagattcagttgtctaccacaaacttagtaaaatacatacagacaagaaaggcgcaaagaaagagccccctgatgcacggctatccgcatacgtcagggggcttgctggctatacttgcgaggggagggatgcataccactacttgttggtagtgcaaaccaatagtggttcgtgagtcaaccactattggttactactatgaacctatagtggttcgcacgtcgaccaatactggtcgccccactgacctatattagggttgttgctccacgtagggataaaagttgtggacgagcggcagataagtttggactacgcacgtggacgataaatctacgtacgtggatatttggatttacgtacctggtctttaagactacgtacatagatagaggaaaagcactacgtgaaggcgcttttttcttcacgagaaggacactttcccctccgctgggtatgggtaggactgccctacccttcttcactgaggaggctaaggacttcggtaagggtgtagtgctcggcggtggcttggggctttcggtagcggcggatcaagccacggaggggacgccacagcgaactaaagtcccgtacactgcgcgtgctgacttcgccctcctcacttaccagcgtacagcgattgctcccagagagcgggctacctgccacacgcgtcacgaagtgctggatcccacgctcgtccgtgatgagcgcagcatcacacagcgtccagagctcgatgtacgtgcccagtgtcgccacggggaaggcgcccagatatgccaagccattcgtctcagctatgggagtgaggaacattcggctatccgaaaggatgcgctcacgataccgccacaagagggagaggctttggcgaaagagctcagtagcctcggtacgtgcttcgggtgtcagcggtgtggggagagatgtagcgggatagagacgcagcagggtgccatccatccgacgcagctgcccctcggggtgctcagtcgaatagatagtgcgggagctgaatgtgagctcctctgtcgaagtagatgtagcttgggtagtcataccttttatttttagatgagacgatacgtcctctcgtgtcaggcagggagtctgcctctcgcaccttgccccgtatgcggataggttgcggacggctcgtagccgttctctggacacttctgatgaaagacacttcccctcctgggaagcaccacgaaggtaggcttttttctaataactacagtgccttactgcaggcctacaataaagtagccagccgttctctcagcatatcgaccgtcaccatatctgtcgtagagatacgatagggagggagatcatacttggagagaaggcggtctttgagtgcgtctcgggcctgctgcgtagtacttcccttatggaagctccagccatcgacctcaatgacgagtagcggacgcttcgtcagcgaattatagacgaggaagtccacgtgcgagagaggactcttgacaaaagctcgctcctcagcatccagtagcgacacatcagcgatgagtctctcaaggggatagtgacagagcacggaaagctcgctacgccccaccccattgagagccttgagtagcgtatcatagaagagcgtctcagatagttgcccggatacctgatgcttggactgataagccaagcgctccgtagtgtactgcgtatatagcagatcaaagaccgagcgcagcttgctctccttcacttcaaagttgttatactgaatgtagctgataagctgagataggatgctcccctcaggcagatcattccctgtcgccacgatacagaggtgagtcttggcacgagagatagctacgttgaggaggtttggatcgtcagagaactctgtcggactattgtccaccatactcatgatgatcgtgtcgcactctcgcccctggtacttatgtaccgtacttgcgatatccatgcccagcatctggttgatagcctgcgcctgatcacgatagggggtgatgataccgatgctcccctgatcctgaaactctggtagcacctcttgcgtgatgacgtctatctcacgctggttgaagcgccctcgggcatgattccccttcacggtgcgtaggacttgaagcaccttctcctcacccttatccgtcgtcatggagatcagctccccatcatagaagcgctgattgcagaactcaatgatcttggggtggcaacgatagtgctcacgtagcagcgtcacgggggcatccttgaagatctctaagcaggacttcaggaagctatgcgtcacagcatcatatcggtcatcgacctgataggtctctcgtatagctgtgagagcaagggcctcctctcggcttactacattaggtagctgcttgtcatcccctacgatcacagcattcatagcacacgatagggtcaatgctcccgtcttgatatcgatctgcgaagcctcgtccatgatgacatagtcaaagacatagtcgggattgatattcccattcgatcggtatgtactactcagcaccacgggatattccttgaggaaagcctccgtcttgagcttgaagtctctgatagtgaactggcatcgggcgccgccactatcatagcgcttgctcaccttgcttttgagaagctggagcgacgaggtcgtaagctccttgacgctctgctttaagtcgatggactgaagacgctgcgtgacggcagaaagctccttctctatcttagactgagaagcctcatagtaggcatcttccaggcaagcgatgacctccgcaaactctctcttgaggaacgagaaggcctgcggtcctaaagtgaatgtactcttcaagcgaaaccaaaagctgggccgctccgaacgctctgcgagctgctgaaagcgcgtaagtaaggccatcagcccagcaggagacttatccttcagccagctgacatcttgcccgatagcctcattaaggagatcattatactgacgctccgtctgcaaggcattgagctcggcccgtagctgcgcctgcttcgtctggtcttcaaagccctgagacaccttccgcagagcctccttggccaccttcttgaccgccgaagcatcctcgagcgcccatccctccatatcggggtaatagggttgctgctgttggatgaaggcctccttgttctcagagttccccagttgtgccacgaggaagcccaagccttcacgctggagcttctcggcaatattctctacggcagaattattatttgataccaccaatatagtcttgcctgcgaggagcaagttcgcgatgatattgaggatcgtctgcgtcttccccgtacctggaggcccctgcacgatactcacctgatggcatagggctgcctccaccgcagccttttggctggcattgcacccgaagggatagtagacttgccgtggcatagagcgcgtagccagcttcctcttatcaccaaggtactgagcaaggggcacgttatctcgcttcacatccaccagacggtaggacttcgctaagatatttgtcccgtcgctggcgcatagtcccgtctcagctgcgagcttcttcagatagtcccacgtagagccccccgtcaggtctatcggcgtgcgggtaatatagatctcccgaccatcaaggcactctacatagccattcgtatgggtcactcgatagaaattgtacgtggagtaggcgaagcacaggagctctgcaatgtcggagatacgcttgttccggacgtagagccccctatgcacgacgttgataggcttgggatctttcagataaaggaggcgagctttattgtactggaagacacggggagaggtcttgaagcgcaccaaccatcctccatgctcactgacatctatggactcgacctgctcggtgatgaacattcgtttgtccccctgccgctccaagtctatgatcatacactgccttgcatccatatctctgagtaaaaaatcaaccaattactataagtcccttgcagctgtcttccactgcgaagaagccccttatgaggcatctaaattaccaagaatagtagatagtgctgtgggagccgaggacggtgcagtggggcgttcgtgcggggcgggaggaggctgcgacgggaggacgtataccttgtgcgagcaaaacgtatacgtttcatacccaagacgtatacgtttcacactcgaaacgtatacgttttcaccgccaaacgtatacgttttgctcacgatacgtatacgtcttgatgagaaggggtatacgttcgggccgtgcaaccgatgaagcaggcactttgagcgaaggggaaagcagagcgaaggcgcaagctttgggtgaagaaagtagcggcctgcctgcaggcgagggatacagcaagcccccagcaggcgccacgaggacggctgctgggggctttgctttagcgggtgtgatccaagagcgggagcggtagggcgctacatacgcgagcgaagatcctgggcactctggcgctcatccttaccctcgatggaggcaccgaaggaataggtcaagctcagcgagtagaggctattcgactcgttcttgacacgcatctggtaggcgggggtattgatattgatgtagggctcggtccagatgaggttgtaggcatcggcagcgatacggagcttcccatcgaggagcgtataggataggcctgcattagccgtgaaggaatgcgagtgcctcagacctccgtcatcgtagcgtgggctcgcgtagtagatggagcaggtaccttggagggtcttactgcggttgaagaagaaggtattgttcatgctgaagctatagctcagaccagagcctccatagggagaggacacatgggcatcaagcttcgtctcattataccaaaggcgctgagagatgtaggtctggaagaagctgactttattgaagaagtagctattctccagtccaatgatccaggtcttctcggcattctcataggtgtagcttcctcggttcgtcgcaggatccaggcgtatcacctgcgtaatcccgtcccataggtagcccccattgagctggaagttcagcgcaccgaggaaggtatatccgagggcaagccgtgcgcgcttcgcagcacgtagatcctccttccctcgcatgatggtgtactgattctcatagttagcgaagggagagagcgcactgaaatgcggacggttgagacggatggtactgctgaggctgaaggcatgacggtcattgggattgtagcctaagaagagcgtggggaagaggttgatgtagctcctcaagttctccagacgacggccgttattctcccctgccgtatgggtgtactccatacgaagccccgtgcgaagactccacgtctcagagaggggatgcttgaagtccgcatagagcgcatagacctgctcatcgaagcggatcttatcgtggtgctcacccatcgtgctcgctgcatcatagtcactactattgctggtgcgcgtccaagccccctttgctccgaagcccagcgtccccttaccgaggggctcgacatagtccaggctggcgatataggagtcgatatgctgatcggtcagcgcattgaagcggaagtccgagcccgcgataggagtaccctgaggggttaggcccgaggaggtaaagctacgatcctcccgattgcggtagccgacatagtccacgtcccacgataggcggcgcttaggcacccccttgaaggtcttctccatgtgggcattcgccgagatgtacctcccatgatcgatgttcaccgcaagccctgggagggaacgaaggagctggtacgagccatcggaagtgatactatagtcgcgagaatcattctcacgatgcgtactatcctgctgaggcgtataggaggcgctgaagccgagtgtgagctctggagtgaaggcgtagtccagtgctccacgtatgttgaagtacttatcccgcccagtgtagtaggtatcactgacatagtaagtcttctgctgaggataggtacgataggtacgcggatcaccatcaaacagccccgtaccggcaccgaggtcaagggaagctgtgaccttgccctgattatagttgaagctcgtactgagaccatagcgaggccgcgactttttgatcccgaaggatggcgtgacacttcccccgaagaagtcattcttagctttcttcaagacgaggttcaagacgcccgcatctccttcggcttcgtacttagcaggtggtgtggtcaagatctgaatctcctgaaggtcggactgtgggtaggagcgcaggagactgaggagagcagtacctgagaggcgcacgcgcttatcgttgacgaggacgatgactccccccttaccgatgagactaatgccactattcgtgacattcaccccaggtgtctgccgtaggacatccagtgccgaggcggcggcaggcgctatctgggtcgcatcgaagaccaggcggtcagccttacgaagcatgatggggcggcgccctgtgacttggacagcggagagctgcttcgtctcctcagtgaggaggagttcgccgaggtcaagagcaccagcgatggtgagcgtctgatgatagggtcggtagcccagcgcacgcacctcgaggaggaaggtgccctcgggagcctccaagcggaaagccccgtgctcgtcactggtagtccctacgacaaggctactatcagcgggatggcgcaggaggacgttagcaaagtccacgggcgtgcggtcagtcgtcttctttagggagccctgtacagcgacggtcgtctgcgcgagaaggctaccagaagatagcgcaaaggcgactgagagcaagtgaatgtgtttcataccaagaggtgcgtgctaatggaaatcgtcccgaaaggtagcgactttatagaaaaaaaaaaaaaaaatagcccccttaaacgcctgtgaaacactgctattatatagtcctctcgccaccctcctgcagtagatgagcgggcgacagcggagctgcgatagactacagcaagcccccagcaggcgccacgaggacggctgctgggggctttgctttagcgggtgtgacccaagagcgggaggcggggcactacatgcgggagcggagctcttgggcactcttgcgctcggacttgcctcggataggagcaccgaaggagtaggtcacaccgaggttgagggtgagtgcactattctcgttgttggcatacatctcatagtcgggagtcgtgatattcagacggaggttattgcggaggaggttgtaggcgtcgagagcgaggcggagcttcccttggaggagcgtgtaggataggcccgctccgccagagatgacgtgccccatatggaagcctccatcgtagccaggtgtccgatagtagaaggagcaggtcccttggaaagtcttactgcggttgaagaagaaggtattgttgaggctgacatgatagctcaagcctgcgcccccgtagagcgaggtagactcagggccgatcttcatatcggagtaccagacacgctgggagatgtaggtctggaagaagctgaccttattgaagaagaagctattctccaggccgaaggtccaggtcttctcggcattgtcatgcgtgatgctcccttgattcgtcacgggatcgaggcggatgacctgtgtgataccatcccagagatagccaccgtcgagctggaagttcagtgccccaaggaaggtgtagccgagagcaagctgggcacgcttggcagcacgcagatcttctttccctcgcatgatgctgtactggttctcatagctagcgaacggcgagagttggccgaagtgggggcgattgaggcggacagtaccattgaggctgaaggcatggcggtcgttggggttgaatcccaagaagagcgtggggaagacattgaggtagctcctcaagttctccagacgacggccattattcttccctgccgtgtgggtgtactccatacgaagacccgtgcggagatcccacttgtcggagagcggatgcttgaagtcagcatagagcgcatagacatgttcgtcgaaggtgatcttgtcgtgacgctcacccatcgtactcgctgcatcgtagtcgcttcggttggtggtgcgggtccatgtccccttagccccaaagcccagcgtccccttaccaatcggctcggtatagtccaggctcgtgatgtaggagtcggtgtgctgatcggtcagagcatcgaagtggaagtctgacccagggatgggagtaccattaggcatcaagcctcgggaagtaaagttacgcccctcttggcttcgatagcctacatagtcggcatcccacgagagacgacgctggggagcggacttgaagctcttctcaaggtgaacattcgccgtagtgtattggctcttgtcggtctcgtcggcgacaccagggagcaggcgtaggagttcacgctcaccactggggaggatgcgatagtctcggctatcattctctcggcgagtatcgtccttctccgggctgtaggatatactcgcccccatggagagctctggggtgaaggcatagtctagccccgcacgaaagttgaagtaagggccctgccccgagtaggcggtctcactcgaatggaaagtgccctgcttgggataggtgcggtaggtatctaggcgaccatcatagcctgaagagcctcctccgagctggagagaagcggtgaccttgtccttcttgtagttgaggttggaagtgaggctgtacaagatcttatccttacgaagtctgaagcgaggagcgatacttcctccgaagaaatcgttcttagccttcttgaggatgatgttcagcacaccggcattcccctcggcttcgtacttagcgggcggggtggtgagtatctggatctcctggaggtcagactgcggataggagcggaggaggctgatcagagcagagcccgagagacgtacccgcttgtcgttgatgaggacgatcaccccgcccttgccgatgaggctgatgccgccgtcggagacgttcaccccaggggtctggcgcaggacatccagagccgagctggcagcgggagcgatctgcgtagcgtcgaagaccatacggtcggccttgcggagcataatggggcggcgccctgtgacttggacagcggagagctgcttcgtctcctcagtgaggaggagttcgccgaggtcaagagcaccagcgatggtgagcgtctgatgatagggtcggtagcccagcgcacgcacctcgaggaggaaggtgccctcgggagcctccaagcggaaagctccgtgctcatcgctggtcgtccccacgacgaggctactatcagcgggatggcgcaggaggacgttagcaaagtccacgggcgtgcggtcggcggtcttcttcaaggtgccctgtattgggaaggtcgtctgcgcgagaaggctaccagaagatagcgcaaaggcgactaagagcaagtgaatgtgtttcatttcaaggagtgcggtgctaatggaagtggtccctaaaggtagcaactttatagaaaaaaaaaaaaaataccccccttaaacgcttgtgaaacaccgctattatacgtcctctccccgcccttctgcagtagacgagcgggcgacagcggagctgcctgagcgaggtagatcctatgggtgagatcgtataggatagcccagatacagcaagcccccagcaggcaccacgaggacggctgctgggggctttgccttagcgggagtgacccaagaatggtagcggcagggcgctacatgcgggagcggagctcttgggcactcttgcgctcggacttgccttggatgggagcaccgaaggagtaggtcacaccgagactgcagtagaagggactattctcattctcgatgttcatctgatagtcgggtgtcgtgacgtccagacggagattattgcgcaggaggttgtaggcatcaactgccacgcgaagcttcccctgaaggagcgtgtaggataggcctgctccgccagagaagatgtgacctgcatggaagccccaatcgtagccaggtgtccgatagtagaaggagcaggtcccctggaaggtcttactacgattgaagaagaaggtattgttgagactgacatgatagctcaagcctgatcccccgtagagcgaagtggactcagggccgatcttcatatcggagtaccagagacgctgggagatgtaggtctggaagaagctgaccttattgaagaagaagccattctccagaccgaaggtccaggtcttctcggcattgtcatgcgtgtagctcgcttggttcgtcacgggatcgaggcgcaggacctgcgtgataccatcccagagatagccgccatcgagctggaagttcagcgccccaaggaaggtatagccgagggcgagctgggcacgcttggcagcacgcagatcttctttccctcgcatgatgctgtactggttctcgtagtcagcaaacggggagagttggccgaagtgagggcgattgaggcggacagtaccattgaggctgaaggcatggcggtcgttggggttgtagcctaagaagagcgtggggaagacgttgagatagctcttgaggtgctccagacgacggccgttattttctcctgccgtatgggtgtactccatacgaagacccgtgcggagattccacttgtcggagagcggatgcttgaagtcagcatagagcgcatagacatgttcgtcgaaggtgatcttgtcgtgacgctcacccatggagctcttggcatcgtagtcgcttcggttggaggtgcgggtccacgtccccttagctccaaagcccagcgtccccttaccgagaggctcagtatagtccaggctcgtgatgtaggagtcggtgtgctgatcggtcagcgcatcgaagtggaagtccgatcctgggatgggagtaccattaggcatcaagccacgagaggagaagttacgccccacttggcttcggtagcctacatagtcggcatcccacgagagacgacgctggggagcagacttgaaggtcttctccaggtgaacgttcgccgtagtatagtgactcttgtcggtattgtcggcaacgccagggaggaggcgtaggagttcacgctcaccactggggaggatgcgatagtctcggctatcattcactcgatgcgtattacccttattccggctgtaggagacattaccccccaccgagaactctgaggtgaaggcgtagtccagccctgcacggaggttaaggttgaagtgaggacttgccccctcgtgcgtcgtttcacttgcatgataggtaccctgcttaggataggtacggtaggtcccaagatagccatcgtagttcagcctacctcctccgagctggagggaagcggagaccttgtcattcttgtagttgaggttggtattgagggaatacatcgtcctctccttttttaattccaaaagcggggagatacttcccccgaagaagtcattcttggccttcttgaggatgagattcagcacaccagcattcccctcggcttcgtacttagctggtggtgtggtcaggatctgtatctcctgaaggtcggactgtggataggagcgtaggaggctgataagtgctgcccccgagagacgcacacgcttatcgttgacgaggatgatcaccccacccttaccgatgaggctgactccatcgtcggagacattcaccccaggggtctgccgtaggacatccagaaccgagctggcagcaggagcgatctgcgtagcgtcgaagaccaggcggtcggtcttgcgcagcatgatcgggcggcgccctgtgacttggacagcggagagctctttggtctcttcggtgaggaggagttcgccgaggtcaagagcaccagcgatggtgagcgtctgatgatagggtcggtagcccagcgcacgcacctcgagaaggaaggtgccctcgggagcctccaagcggaaagccccgtgctcgtcactggtcgtccctacgacgaggctactatcagcgggatggcgcaggaggacgttagcaaagtccacgggcgtgcggtcagtcgtcttctttaaggtgccctgtacagcgacggtcgtctgcgcgagaaggctaccagaagatagcgcaaaggcgactaagagcaagtgaatgtgtttcataccatgaggtacggtgctaatggaagtagtccccaaaggtagcgactttataaaaaacaaccccataaacacctgcgaaacaccgctattatacgtcctctccccgcccttctgcagtagacgaacgagcgacagtggagctgcctgagcgaggctgatcccatgggtgagatcgtataggatagcccagatccccgatatacctctccgaagtgatacgcaagcccgtggccttatcacgagtattcctcttatccagcggagagaaaagtgtccttctcgtgaaggaaaaagcaccttcacgtagtggttttcctctgtctatgtacgtagtcttaaagaccaagcacgcaaatccaaatatccacgtacgtagatattagagccacgtacgtagtccaaacttatctaccactcgtccgcaacttttatccctacgcggagcgacaacctaatacaggaatcaagagaaagctatacggaatcagtccaaagctatatagctttcttcgccatcctatatagctctacccacgtactcatataggtcagcccgtcgaccaatataggttcaccccacccctcctacaaggagcatatccacccatacgctcctcccccaagaaatcacagcgaagacgaggcgcttacgatgggagaaggcccccgcctgctctgtggggaaggcctgacccaagagagcatgcagacttttagtatctttgtcctatctgatcagattcgatgcaagctataggccagctacaccatatatataagacccttggtatgacctaccgcctcctcctcgtggcggtggtgtgtctgtgtgcctatatgacgggcgtcgctgagacgcctcagccccagcatgacaagaccttcggcctcccccttaccctctcacagagcgctcagatcagctatctggctgcccagcccagcgccgaagactcttacaccctctacggccatgcaggcctacgcgtatgggatgcagagcaggggatcgatgtgaccttcaactacggtatcttcaactttaccgacgacttctccctgcgcttcactcagggcaagaccgactacatcgtcctacccatagcgaccagtgactacataagcgagtatcagagccgtggtgtcatccgcgagctggtactcaataccgacagcacacagcgtgcccacctctggagactcctcatcgagaatgcacagcccgagaaccgcacgtaccgatacaatgccttccgcaacaactgcagtacgcgcccgctggatctctacttcgcgaccttgacggacttcggcaagctcgacgagcgcgggagtcagctgaccttcgtgctggacagcgtgcctggcatcacgccactccccgacaagacttggcgcgaggcgatcaacgagctggaggcctcctccccctggctggtgctggggacagatctcgcgatgggccccgagctggacgagaagatgagtatccgcgaccgcttctttatccctatggaggccgcacgcctgctcccccacctcgctatgggcatcgtcacccctgaccaagagatctggggacgccccatccagcagacgctggagtatggcgagccacgtcctatcgcacccgcaggcctcagcgtgacccatcccctcgtcatcttctccctcatcctcctgctctctatcggggtcttcatctggcgctggctcagaaagcccgtcgctggagtcatcgaattcagcctctatctcgcagcaggcctcggggggacgctcctctgctacctcagcttcatctctgagcatccgatggtatcgccgaacttcaatctcctcgcgctccatccgctctacctcatcatagcactcctgatgcccgctgggcagcgtacacgccgtgtgcgcacagtcctgcataccgtctgtctcgtgctactcatcgccttccccatcgtgagcctcatcgcagggcaggtgatcaacccgagcgtctatctgatcgctctcagcctcggtctcctttcgctggggcgtctccttcacaagcctatatctcataagtatgtccaagagcccactggagcagcgtagcatgcgctacctactgacctcactgctggcccttgtggcactccagcagccgctgcaggcgggggacctccctcgtgtagtcgtctatatcaccatcgaggatctccgtggtgactacctcgagcagctacgcccactcttcactgaggacggcttaggccgtatgctctccgaggggaagatctacccgcatgtccgcttccctctggcggagctggaccgcgcctcggccacggctaccctgcatacgggggcctatcctcaaacgcacggcatcgagcgcacgacgctttggagcaagaaggagcatgcctggcgctcggtcttctatgaccccagcgtcacggggagctacacccgcgatacctattcgcccaaggcactcttagtcaatacccttggcgaccgcatcaaggaggcctcctcgggtgcaggcttggtctatgccatcgcctcggacgccgagaccgctatcgcctcgggcgggtggtttgccaacggtgccttctggctcgacagcaagatcgcctcatgggccagctcgagctactacgaggcgatgcccaagagcctcgaggcctacaaccgctccgccgaagggcctaataagcgcctcgtcggggggcagatggcatggagtccgctccgtagctacagctcaccctctcgcacctggtccgactggggtggtcgcttcacgcaccgctatcagggacatcaggcagcggacttcaagcgcagcgctctggccaacgaagaggtcacgagccttgcactacgtctactcgaccaagggggctatgccgagagcaagtcgcctggtatgctggccctctcgtacagccttgacgtcgcaccacgcgaagctcagggtgagctgaccagcgaagaggtagacgcctacgtacgacttgacaagaatatccaagccctcctgcaggagctccgtcgtaagttcggcgaaggcaactacctgctcgccctctcgggtacgggctatacccactatcgccgtccacgacttcgcggtgctgaggcccgctacgggcagttcagcgccaagaagggtgctgcactgctcaacctctatctctccgccctctacggtcaggggagctgggtagagcgcctcgccgatggacgcgtgtacctcaataggaagctcgccgagacgaagcgtatcgcactctccgagctccaggataagtcggccgccttcctcgaggaaatggagggcatcggtatggctgtcgctggcgagcgtctggtcacccagtcctctctgagcgatgccgcccgagcacttcgccgctcgatccacgtccgccatatagccgacgtctactggaccctcacgcccggatgggaggtcgaggatcctgcagacagccccaacctgtggcttcactccacagccatcagcagtccctgcatcctcctcggagcagggatcacggcacgtgacttcgactaccctatcgtcgaagcccccgacgtagccaaggccatcgcctacgtcctccgcatccgcccgccgaacgccgcacgatagcgcaccccgagtatagggtctccgataccacatcgccctatacatttaatatatatgtagggagtacccttccccgctatcacagccctaaggaagccctcccactccatcatacaagaagaaataaaacaagatatatgggattcatagacctattgtcgaagctattcggcaacaaatcacagcgtgacctcaaggagatcacgccttgggtagagcgcgtcaaggccgtctaccccgagatcgatgcactgtctgacgacgacctgcgtgcccgcaccgcctcgctccgtcagcgtatcaacgactacgtagccagcgaacgtgctgaggtagaagaactcaaggccagcgtcgaaggcaaggagctcgatgagcgcgaagctatctgggccaaggtagacaagctcgagaaggagatcctcgacaagctcgagatcgtcctcgacgaagtccaccccgaggccttcgccatcgtcaagagcacgggtcgccgcttcgctgagaacgccgagatccgcgtcaaggctacggactttgaccgcgacctcagcgtcagccacgacttcgtccgcatcgaggacgatatggccatctatcagaaccactggctcgctggtggcaatgagatcacctgggacatggtgcactacgacgtgcagctcttcgggggtaccgtcctgcacaagggtaagatcgccgagatggctacgggtgaaggtaagactctcgtcgctacgcttcccgtcttcctcaacgccctcacgggtaatggtgtccacgtcgtcacggtgaatgactacctctccaagcgtgactcggagtggatgggcccgctatacatgttccacggcctcagcgtagactgtatcgacaagcaccgccccaatacccccgagcgtcgtgcagcatacaacgctgacatcaccttcgggacgaacaacgagttcggcttcgactacctgcgcgataatatggctaccagccccgaagacctcgtgcagcgccgtcacaactacgctatcgtcgacgaagtagactccgtcctcatcgacgatgcccgtacgcctctcatcatctcaggccctgtgcccaagggtgacgatcagctcttcgagcagttcctccccaacgtagagaccgtcgtcgatgcgcagcgcaagctctgccagcagctcctcatcgacgctaagaagaagatctcttcgtcagacaagaaggagcaggaagaaggcttcttcctcctcttccgtacctacaagggtatgcctaagagcaagcccctcatcaagtacctcagcgaacctggtatcaaggccggtatgctcaaggtcgaggaagagtacatggccgacaacatgcgtcagatgcacctcgtcaccgacgagctctacttcgtcatcgacgagaagcacaatagcatcgagctctccgacaagggtatcgacctcctgacgcgcggtacagatgaccccaccttcttcatcctccccgacatcgccagcctcctggctgacctgtcgaaccaaggtctcaccaccgaggagctcgccgagcgcaaggaagccctcctctccgactacgctatcaagagcgagcgcgtacacaccgtgaaccagctcctcaaggcctatgccctcttcgagaaggatgaccagtatgtcgtcatggacaacaaggtcatgatcgtcgacgagcagacggggcgtatcatggacggccgtcgctactccgacggcctgcaccaggctatcgaagctaaggagcgcgtccacgtcgaggctgctacccagaccttcgccaccatcacgctgcagaactacttccgtatgtaccacaagctctctggtatgacgggtacggcagagaccgaggcaggcgaactctgggacatctacaagctcgacgtcgtcgtcatccctacgaaccgccccatcgctcgccatgacctcaacgaccgcatctacaagacggctcgtgagaagtatgcagcagtcatcgaggagatcgtccgcctcgtaggcgaaggccgccccgtactcgtcggtacgacctccgtcgagatctcgcagctcctgagcaagatgcttgacctgcgtaagatcccccacaacgtcctcaacgctaagctccaccagaaggaagctgagatcgtagctcaggcaggtaagcccggcgtcgtcaccatcgccaccaacatggctggtcgtggtaccgacatcaagctgacgcccgaggtcaaggcagctggtggtctcgccatcctcggtaccgagcgtcacgagtctcgccgtgtcgaccgccagctccgtggtcgtgcaggtcgtcagggtgacccaggttcatccgtcttcttcgtatcgctcgaagaccacctgatgcgcctcttcgcctcagaccgtcttgccgctatgatggataagatgggcttcgaggaaggtgaagtactcgagcacagcatgctcaacaaggctgtcgagcgcgcccagaagaaggtcgaggaaaacaacttcggtatccgtaagcgcctcctcgagtacgatgacgtgatgaactcccagcgtgaggtcatctacaagcgtcgtcgccacgccctcatgggtgagcgtatcgagatggacgtcatgaacacgctctacgatgctggacgcctgctcatcgacacgcaccagcctgccgaagacttcgagggcttcacgacagacattatgcgtaccttcgctatggagtctcccttcgacgagcagaccttccgccgcaccaaggctgatgacctcgccgaccagctctacgaagcagtagaatcgacctttatggctcgcgctaagcagatcgccgacatcgcttatcctacgcttcatcaggtcttcactgagcagggtcacgtctatgagcgcatcatgatccctctgaccgacggacgtatggcctacaatgtcagctgtaacctccgcgaagctgatgagagtgaaggtcgcacgatcatgcgtgagttcgagaaggctatcgtcctgcatatcatcgacgaagcttggaaggaacacctacgtgagatggatgagctgcgtaactctgtgcagaacgccagctacgaaaacaaggatcctctcctcgtctacaagctcgagtcctacgagctcttccgtgcgatgatcgaagatatgaaccgcaagacggcctccgtcctcatgcgtgtccgactcaacatcgctcctcccgaggaagaagctccccgtcaggtagagatccgcgaagctgcccctgaggtacagcgccctgcgccccagtaccacgagcagcgtcacgaagtcggtagccccgaggaccgcgaagagcagcgccgtacgcctgctcaggcagcccacacaatcggccgcaacgacctctgtccctgcggtagcggtaagaagttcaagcactgccacggcaagggcttctaagcactaaggtccctacaccttatatataagctcgcccccagctcccgatcgggagttgggggcgagcttcttttttgaggcattccccactcatctctaagtgctattcgtgccttgtgagtaaggcttgttgatagtgtaccacgaaaaaacgtatctttggaatgctttgtacacacacaaaaaggacaattagaatgaagaacttcgatatagccatcatcggtggcggtcctgctggctacaatgccgcagcgaatgcttcagccaacggccttcaagtagtactctttgaacacacagccctcggaggcgtctgcctcaatgaagggtgcataccaacgaagaccctactccactcggccaacctcctcgacgaaatgcgcgaaagcgctgcttatggtatccatgtagagggagctatctccgccaactacgcagagatcattgcccgcaaggataagatcgtcaagacccttaccggaggtgtctcctacaagctcaagggtgctggtgtcacggtcgtctccaagactgctcgcctcacgggcgaagagggagaccgcatcttagtcgctacagacgacgagacctatgccgtgagctacgtcctccttgctactggtagtgagactgccatccctcccatccctggcctcagcgaagtcggctactggacgagccgcgaggccctcagtgccacgacactccccaaggacatcacgatcatcggtggtggggtcatcggtatggagttcgctggtatctatacctccctcggtgtccccgtacgtgtcatcgagatggctcccgagatcctcggcgctatggacagcgagacctcgggcatgcttcgcaaggagtatgcacgacgtggtattcagttctacctcgagacgaaggtcacagcagtatctgctgagggcgtaagcatcgagacgaaggacgggaagaccgaaatcctccccacctcgcagatccttctgagcgtcggccgtcgtcccgtgacggatggcttaggccttgagacactctctatccagatgaaccgcgcagccgtagtagtgaacgagtacatgcagacctcccacccccgcgtctatgccgctggtgatatcacaggcttctccatgcttgctcataccgctatccgtgagggtgaggtcgctatcaaccatatcgtaggtggtagtgatgaccgcatgcgctacgactctgtacctgctgtcgtctacatgcaccccgagatcgcaggtgtcggggctaccgaagagaagctccgtgccgaaggccgctactaccgcgtgctcaagctccccatggcctatgcaggacgctacgtcgtagagaacgagcaagcccctgggctgtgtaaggtccttgtcgacgagaatgacaccatcctcggctgccacatcttagggaatcccgcatcggagctcatcctcctggctggtattgccgtcaccgaccgctccagcatcgaggacttccgacgccacatcttcccccaccccacagcaggggagatcctccacgaggtcctcttctcctaagagcggcctacccactccatagatataatagacacatcatataagctaaatctcatggcgacattcgatatcaagatgcccaagatgggcgagagcgtaaccgagtgtacgatcaccgtcctcaacgtgaaggtaggggactacatcgaggaggacacagacctcttcgagatcacttctgccaagacggccgctacgatcccctcccccgtagctggtacgatcgtcaagatcaactatggcgaaggcgacaccgtcgctgtcggtgagcccgtcatcatcgtcgacacctcgggtcaggcagtagctcctgccaccccagcacccgcagctgagaaggaagcacctgctcctgctgctgcccccaccccatccattcccgtcaccgaagttcatcgtggcacggtagagcgctggtactcaccagtcgtcctcgagcgtgctaaggccgctaaggtaagtcaggaagagctggataagatccaaggcacgggctttggtggtcgcgtcagcaaggccgacatcgtccgctacatcgagcagaagaagggggcacccgctcctactcctcgtgcagagcgcgctgcagctccagctcccgcatccgcccctcgtcctcaggtcgcagctcccgctgtgcccgttggtcccgatgaccgcgtgatccctatggatcctatccgccgtatcatcgctgaccgcatggtacagtcggtacaggtagctcctcacgtaacgagcttcctcaaggccgatatcacggatctggtgaagtggcgcgaagcagagaaggacaacttcaagaagcgcgaaggctactcactgacgtacatgtctcccgtcatcgaagcggtagctcgtgcactgaaggacttcccccgcatcaatgcagctgtcgatgggtacaacatcatcgagcgtaagcacgtcaacgtcggtatggctgtagccctgcccgatggcaatctcgtcgtgcccgtcatccgtgatgccgacaagctgagtctggctggtatcgctgagcaggtagctcgccttgcagacaagagccgcaagggtcagctcacgccagacgaaatgtccggtggtacgttcacgatctcgaactacggctcctcgggcacgctcttcggtacgccgatcatcaaccagcctgagtccgctatcctcggtatcggggctatcgaaaaggaacccacgatcctcgagacgcctgctggtgacgtcatcgccgtccgccataagatctatctctccttctcctatgaccaccgtatcatcgatggtatgctcggcggcgccttcctgcaggctgtagcacgctacctcgaagaatggaagactaacaacgcataactatgagctcagtaaagaagatatatgggatcaagaccaccgacaaggagacccttcgtcgctggtactacctcctctacctcggccgctgccttgatgaaaaggcgcccagctacctgctacagtctatcgggtggcagttccacgcctccaacgctggccacgatggtatccagctcgctatcggacagatcttccagcgaggcaaggaccatctcttcctctactaccgtgacctgctggcagccctgtcggctggtatgacggtcgaggagatgatcctcaacggtatctctaaggctaccgaccccacgagtggcggccgacacatgtctgaccactacgctaaggtcgaatggggtatccacaacatctcctcctgcgtcgctgcacatgactctcaggctgtaggtctggcacgtgctctcgactactatggcgtagacggtgtggctatcgcttcgcacggggaatcctccgcttccgaaggctacgtcttcgaagccatcaacggtgcagcacgtgagcgcctcccagtcatcttcgtcctccagggcaatggctatggcatctccgtgcctacgcacgagcagacggctaacccacgcgtcgggcagaactacgctggtatccgccatctcaaggtcctcttctgtaatggtaaggacgtctttgactccatgaacaccatggaggctgcacgtgagtacgcagtcaagcaccgcacgcctgtcgtcgtcacggcagactgcgtacgtatcggcgcacactccaactcggataagcacacgctctaccgcagcgaagaagagctgcagcgcgctcaggcagcagacccgctaccgaagttccgccgtatgctcctgcgctaccatcgcttcaccgaagaagagctacaggctatcgaagcagaagcacgcgaagagctgaaggtcgctaaccgcaatgctctcaaggcaccagatcccacggctgatacggtcatggagtacgtcatcggcgaagcttaccctggcgacaagtacggcacgggtatccccgatggttcgggcgagaagctcacactggtacaagctctcaacaagaccctcaagcaggagttccgtcacaatcccgacaccttcctctggggtcaggacgtcgctaacaaggataagggtggcgtcttcaacgtgacgaaggggatgcttcaggagttcggcaacaagcgtatcttcaacgctcctatcgcagaagactacatcgtcggtacggcgaacggtatgagccgcttcagcgacaagatccgtatcgtcatcgaaggggctgagttctccgactacttctggcctgctatggagcagttcgtgaactccacacacgacttctggcgcagcaatgggcagtactctcccaatatcaccatccgcctctctacgggtggctatatccaaggtggtctgtaccactcgcagagtgtcgaaggtgtcctgacgaccttccctggtgctcgcgtagtttatccttgcttctcggacgacgctgctgggcttctccgtacggcgatgcgctcacgcggtgtcacggtcttcctcgagcccaaagcacagtacaatagtgctgagtctgcctccgtcatccccgaagacttcgaagtacccttcggcaaggcacgtatccgccgcgaagggacggatgctacgctcatcacctacgggaatacgcttcacttcgctctcaatgtcgctgagcgcatccagaaagacctcggcaagagcatcgaagtcatcgaccttcgctcgctcgtaccctgggacgaagagaccgtctatgcctctatccgcaagacgtccaaggcgctcatcgtacacgaagaccgcgtcttcggtggcttcggtgcagagctcgcggcttcgatcgccaagaaggccttccgtgatctggatgcccccatcttccgtgtcggggcactctccacgcccgtaggcttccacaagtgctttgagctgacgaccctgcccagcgaagacaagatctacgccgcagctaaggagctcatcgaatactaaccccaaaagcaacgacaatatgaagactataggactgctctacagcaagagcacagcctacaccgccgagctgggagagcgtatcgctgcagcctgggggaaagggatcgaatatgtagacatcgacacggcgcatctggctgacgtcgagaagcacgcagctctcatcctcggtacgcctacctacttcaacggcgagctgccttcggcttgggacgaattccttcccgagatcgaggacgctgacttcaccggcaagcgcgtagctatctacggccccggcaatcaggtagagacccccgtcagctttgctgatggcgtgggtatcctcgccaggtacttcgaagagctgggtgctgaagtcgtcggccgcacgtcacgcgaaggctacgagtacgagcattcactcgccgagtgcggtgatcagttcgtcggcctcatcgtcgatcccacgaatcagcctgagcttaccgacgcccgcctcaccgcttggatcaagcaggtcaagaaggaatttggcgtaaagtaaggcgcacgtagaggccacgcctctatttgctatccatcgcaagtccgccccctcagcgcacccacgacagtggtgcagcgtctgagggggtggacttttctattcggccctatgcgctcagcgaacgaaggggcttatttcacggcaaaaagtagccgagtcgagggagcaaaaggaatgtgatccatcctctcaccatcgctactgcacggacggaactactgaaggcggtgagaaaaggtacttgacttcgcgtgctttcctccttgagtttgcagcagaaaatacggttaacttcaaaaaatcaaccgtatgaatgcgcacatttatacgtatcaacctgcaaatttatacgtattaattttcggatttatacgtattaatcgccgaaataatatgtattaattctcgcattaatacgtataaattgccacaaagctatttaagaattgtcggcatcttcctcatgaagacgcacgaacttcaggaagaaacttcgcccacgcaagtacctttgcttggttagctgagctgtttcggctaagtttgcaccgcagtcaaggcgccatcccgctttggaaagtactcacgcaaaagcaatttcacttgaaacaattatacactctcgccgtcgtcctcctcacagcactcaccgaatgccttgggcaaacggtctggtatgacccgatgcagaccagcggggagacttatatccacaaccaaggctggaatgaagacggcggcaactaccaccgcttccccgatcgcgccaagggcttggtgcgggaaaaggtatgggagcacgcctgccaatcagcaggcttggccatccgcttcagcacggatgcacgagaggtcagcgtgcgctacgtggtctcacaacctcagagcatgccacacatgcccgctaccggcgtgtcgggtgtcgacctctatcgcgccgatgacatggctttttgcttcgggagctatagcttcggcgataccattcgctacaactacacgcttgacaaaggggtagcggtcgggcgcgaagccgaatacgtcctctacctaccgctctacaacgaggtcacttgtctggagatcggtgtaccgaaggcaagtcgattcgcctttgttcccacggtcaagaaagatcccatcgtcctctacggcacttcgatagcccaaggcgcctgcgcttcccgccctggcatggcttgggcgaatatcgtggggcgacaaattgagtgccccttcatcaacctcggcttctcgggcaacgggaagctggagagcgagatcattgacctaatatgtgagcagcgcccttcgatcgtgatactcgactgcatgccgaatatgggggccatcgagagtgacgagatcatcaagcgcatgaaggaagctgtccgccgtatcagcaagatccctggggtcgtgatcctccttgtggagcacgcaggcaatagcaatgccctcacctccgaagcccaaggcagggagagtgcacgctgcaatgcggctcagcaaatagcctatgcgcagctccaagaggaaggcgtgaagaacctcttctacctctcgcgagaagaactcggcttagcacccaatgcttgggtggactacgtgcacccttcggactacggcatggcgcagtacgcctcggctatcgtcaagaagctatgggagatcatcgtcctcgcgcagtggactccgatggagagccgttagtatcctccgctcggaagcccttttctgaaggcatcactcacggtgcatgggggctttttagtacctttggggcgagatatgtttgtttggttcgtaattaattagatcatacgtggaagccaaagtcccctcctctacctcgcactacctccgttcttcggtcccagtgattggggtcgtcatcttcttcctattccttgcgttagcttactttgcgcccgcagtctttgagggccgtgagctcttccagcaagacgtcgctggtgccagcggcaatgcttcagatgtctacaagcacatggaggctacgggggaaggcttctcctactggaccaacagcctcttcggggggatgccgatgtatcagatcgcaccctcttacccctcggtaggcgtcatccgcacgatacaagatgtcctcacgctgcagtggcccttcacgctcctaccaggctatagctggctgctcttcgctatgctcggtggcttctatctcttcatgcgtgccctgcgtatggagcgcctaccatcggtgctcggggcgatcatgtggaccttctccagctacttcatcatcctcatcacggcaggacatatatggaagctgatgactctctgcttcatcccgccaacgatcgcagggatcatacacacttatcgcgggcgctacctcctcggtggtgccatgacagctctcttcgcggcgcttcagatcctatcgaaccacgtgcagatgagctattacttcgccttcctcattgtcttcctcctcatcggctacttcgtcgaagcgctgcgaggaaaggctctgcgtagcttcatcatcgctacctgcgtcaccctctttgcaggtgctatcgctatcggcatcaacggctcgaacctctatcacacctatgaatatgggcaggagacgatccgtggtggtagcgaactcacacccgaagctaccgaaggtaaccaacagcaggtacaggctaccgctaagggcctcgacaaggaatatatcaccgcctggagctatggcaagggtgagaccttcacgctcctcatccccaacctctacggaggcgcttcgggggcgctcagcgaaggctcagcaaatatggaggatgtgcctgccgaattccagcagatcatcggaggtatgaaccactactggggtgatcagcccttcacggctggtcccgtctatgtcggtgccttcgtcttcttcctcttcctcctcggtgtcttcatcgtgcgcggcccgctgaagtgggcactccttgccggtacggcactatctattgcgctggcgtggggtcacaatatgatgtggctcaccgacctcttcatcgactacatgccactgtacaataagttccgtacggtgtcatcgatcctcgtcgtcgctgaattcaccatccccgcactcgccgtgctggcattggtcgaattcgcacgccatccgaaggaagtcctccaagacaaggtcgccgtatatgcgagccttgccctgacgctcctgccctgcctcgtgctgtggctcgttcctcagaccttcctcgggctgatgagtgacgctgagcatgagatgttccgtcaggcgatgggcaatagccagctccccgtctcctcgatcatgagtagtctgaaggaagtccgtgccggtatcgtctcggccgacgctatccgctcagctatcgtcatcatcctctccctcgtcccctgcgtactctatgcacagggaaagatcaagaagtccctcctcttcgcctctatcggcgtcatcaccctctgcgacctctggctcgtcgacaagcgctatctgaatgatgatctcttcatccccaaggaaagcgtcgaagcacaggctcgtcctgtgaccgctgtcgacaaggctatcgccgaggataaggatccacactatcgtgtgatgaacctcgcagtcaatagcttcaacgatgctacgaccagcgccaatcaccgcagcgtaggtggctatcacgctgctaagctccgtcgctatcaggacctcatcgagcgtcagctcgccaagcagaacatgcaggtctacaacatgctcgacacgcgctacttcatcttcgctgaccaagagcatggcctgcagtatcagaagaactccgaggccttcggtcccgcatggttcgtcaatgatatccgctgggtcacgacagctgacgaagagatgtccgcgctggatgatacgcccctgcgcactacggctgtcgccgacaagcgctttgagggcgaactctcaagctacaaggctgctcctgccactgctactacagatagcctcgccacggatagcctacagcccgcacccgctatcggtcaggtcgagctcctctcctacgctcccagccaagcgaagtaccgcgtcacgaccgatgtacctcgtctcctcgtcttctctgagatctactatcctcacggatggcacctcacgctggacggcaagagcgagcttcctctggtacgcgctaactacacgcttcgtgcagcctatatcccagcagggacgcacgagctgacgatgaccttcgaccccgcttcgatccatcacaccgagctggtcgctaagatctgcaccgcactactcgccctactcctcctcgcctccctcgtccagcccttcctcaagcgcaaggacaagaaggctacgactccgcaacattaacccttcatcatatttatcccaagcagcaatgatcaagcaagtgatcacaggcgccctcgtatcggcgactgtcttactcaccgcaagcagctgtagccaaaagctacgccccatgacggccgaccaagtcaaggccgaacctcagcccctcgaagtcgtcgggggcaaagtacctgtagccgtccacctcaccttccccgcgaagtggttccccaaggatgctacgctgaccatcgtccctatcctccgctatcagggtggtgaaaagtggggcaacggcaccaccttccagggcgaaaaggtctacggcaacgaccgtatcgtgtaccatgctaatggctccaacgctaccgtcaacttcatcctgccctacgtccccgctatggcaaagagcgagctctacctcaacttcaaggggaagcagggtagccgcacggtcaagctccccgacctcaaggtcgctgatggcgtgatcgctaccgaagctctcgctacgctcgcaggcgtgacgcccgtcatctctcccgacggcttccagcgcgtcatcaaggaggcgtatgatgccaacatcatgttcctcatccagcagtccaacgtccgcagctctgagctgaataaggacgaggtgcaggagtggaagtacaccgtacagaacgctaaggagactcccaaccaggaggtatccgtcgaagtccaggcctacgcctcccccgatggtggtaaggagctgaacgaaaagctcagtgcttcgcgtgagaagaacaccacggcacagctcaagacggctttcaagaagcagaagatgtctgacgtcgctatcgacgctcactacaccgctcaggactgggaaggcttcaagaagctcgtcgagcagagcgacttccaggacaaggaactcgtacttcgcgtactgagtatgtaccccgaccccgagcagcgtgagcatgagatccgcaatatctcggctgtcttcagcaagctcgctgatgaggtcctccccaagctccgtcgctctcgcctcatcgccaacgtcaagatcattggcaagagcgatgctgagatccagagcctgctggagaagttccccagcgcactgagcgtcgaagagctcctctactcggctaccctcaccgatgacgtagctcagaaggagaacatctacaagctcgtcatgcagaagtaccccaaggactaccgcccatacaacaacgtcggctcactctgcctgcagcgtggcgactatgaggctgccctcgtatggttcgaccgtgcgctcaagcgtaaggacaaccccgagacgaaggtcaacctcggtctgctggctctgaaggatggcgacctcaacaaggccacctcactcatcgccgaaggtagctctatgcctggtgtaggtgacgctcttggcttcctctacctgcgtcagggtgactacgccaaggcggagacggcctatggtgatgtcacgacgaacaatgctgccgtagcacagatcctcaaccacaactacagcaaggctatcaagacgctcgaagctatcgctaagcccgatgctacgaccgactacctccgcgctatcgtagctgctcgcatgggtgactctgccaaggctatctcttcgctacagaaggctctgcagaaggatcccagcctcacctcacgcatcgatgctgaccttgagttcgcttcactgcgtggtctgaaggacttcactcagctgacgcgcctctactaagcctactcgctcattaagtaagcgaccacaaatacgccaccgggcggctacctcacgatggaggtggccgcccgatggcattataaggggatagctctctcgggagctaatctatgggaaaggcttatttcagatggagtccattgaggaaggctgaggcaggcatcgccttcttacctgctggctgtagggtcttgatagcaagacgccctgccgaggtctgaatctccagactacgtcggcccgtgatgatgacagagccgatggggtgctcctccgtggggagatcttcaccgctgacagccgtctccaggatcttgaagggctgagcttcttcgccagcaaaggagagtaggcaccatgctgcaggataaggagacaaaccacgcacgaggttatttagctctactgctgggcgatcccagtgtagctgggtattctccttcgtcagcttaggtgcatgcgtgggattcgcctcataaaggctctggggcttggccttaggctcttcgtctgcgaggaagaggtcgacactgcgctggagcgtctctgctccgaggagcatcagctcatcgtggatcttccccacacaatcctctggctcgatcggtaggctcgcctgcaagaggatatccccggtgtcgagctcatggcgtaggcggaaggtcgtgacccccgtctccgtctcgccattgatgatcgaccaatggatgggagctgcaccacggtacttaggcaggagtgagccgtggaggttgatcgtcccgaagcgggggagtgaccagacgacctcggggagcatacggaaggcgaccacgataccaagatcggggcgtagttccttcaggcgaccgacgaaggcttcatccttgagacgctcaggctggaggacctcgagtcctaccgattcggcgtagatcttgatgctgctctgcttgagcttatgcccacgacctgcgggcttatcaggcatcgtgacgactgccacgatgttgtatccaccttcgacgaggcgctggagggacggcagggcaaagtctgccgtcgccatatatacgatacgtagatcttctttcttcatctgtttataggggctatggtggagcaaagctacaaagaattgccctatcggctggagggagagacactacgagagcgggatatgaacctatataggtcgtcggggcaacctatattggtcagcttcgtgacctatattggtcggctttgcgatctatataggttcacccgacgacctatataggttggtagcaccctcctttagatagctactcgggacagtagcctctctatggttagaggaagctgaggccttggaagcaccaactattcgcagaggatatgtcgggatgtcgatgaaaatcactatctttgcgccgttcgacgattgtctcgaagacgagaagccctccttcctccgcggacagagaggactcgtgtgatgggaaattagaagacactaattttgagtaacacaatttaaaacaaagagaatgaagactttccaactctcaggccagctccgcaacgagctcggtaagaaggccgctaagggcctccgcgctggtgatcagatccccgcagtcctctacggaggcaacgaagtactccacttcaccgtaagccaggatggcgtgcgtaacctcgtctactctccagacatcttcgctatcgacctcgacatcgaaggccgtcaggtcaaggctgtcctcaaggacctccagttccaccccgtcactgacgctatcctgcacctcgacttcctccaggtagaagctacgaagcctatcgtcatggaagttcccgtcgtcctcaccggtcacgctgaaggtgtgaaggcagggggtaagctcagcctcgaaatgcgtaagctcaaggtacgcgctccttacacggagatccccgagaagctcttcatcgacgttacggagcttggtcttggtaagaccatccaggtcggtgccctcagcttcgaaggtcttgaagtcatcaacgctaagaacgctgtcgtctgcgccgttaagctcacccgtgctgcacgtggtgctatggctaagggcaacaagtaagctacagctcagcctaagcgatagagcacctctgcgtgctcccatcgcccaacctacagaggctacccctaccacatataggggtagcctctcttcttttccctcctaccctctcccagctcatgtagtcccgaccatcagatgtcccttcgcgctcacctattccttctcctcagcctttttgctctcaccgcaccagtctactcgcagccttaccccgaagctatcgagatactgcgccgctatgagcagcgtcctggggtacgtgtcacagctctcgtacgcgatctccagacaggagagcccgtacttgctcaccgcacgtccgaagccttccgcccagcctcgctggtgaagatccctacgacgggagccttcctcgcgctacgtgggcacgactaccgcttccatatccccgtgatgatccgcgggcaggtcgatggcgagacactgtatggagacttggtgctgaaggcttcggcagatccctcactgggctcgcactacatccccaatcagaagcgcctcatcagtgaggtcaaggcgctgcttgaggagcgtgggatcagccgtatcacgggacgtctaatcattgacctcaagggcttcccccatccgttcttcaatgagacttgggccgacgaagaccttgacgagtactatggcgctcccatctcgggctttaacatcgcagacaactacgccgatctctacctcttctccagcgacggggagcagcctgtcgtagagccaaatgttgcttcactcctcgtccccacgcgccaagagctactcctcggtagttcaactcggctggatctcaccccaatgcgtagagccgacaccctgctcatctcgggtaccgtacgcgaaggcctctcaggtcgacacctacgctggacgatacctgaccctcccagctacgccacagtgtggctcaatgaaggccttcgcctcgaggggattgacctacaagatcgccccgagctcaactacgacgagctcatcacgggcctcgatacgctgggctactacacctcactccctgcggataccctcgcgaagatcacgaacttccgtagctccaacatctatgccgaaggccttgcctatgcactcaatagctacgagcagcgcaagacggggcaaccgacagtgatgcgctcctattggcgagagcacctggggcttactccgaccgagttctatcctatggatgggtcgggactcagcccagagggacgcctctcctcaggtgcactcagcctcatcctctcagagctctggcgtgaccagtctctccacaagcctttcttggcctcactccccgaagctggtgtcgaaggcacagtacgtagcctctccatcccgagcgaagtgaccgcctacctcaagagtggctctatgcgtggtgtacgtggatatgcgggctacctccttcataaagacaagtggtacagcatcgtctacatcgctaacggagccatcaatagtgctgaggcgcgtgcgaccttcacccgcctcttgacagggctcttcacccagcagccccttcctccgcttcctgcccccgcgaagaaggtagcggcgaaggggaagaagcatagcgagcacagcaagggtagcaagaaggcttcgcacaaggcctcctctaagtcctcacgcaaggggaagaagcgttagcccaagaagctaatagcgtgctacatgggcggatagtcgtatatttgcgctatagtataactcggtatccttctctaatcccctttccagagggagcataccccaaggaatatgaaccaaaagactacctttactactctcgctctctgcgccttcgggtgcatcggaacggccaaagcccaagaagctcgctacttcaatcccgtgacagctgcggtcccatcactacagattagccctgatgcgagggcctctggtatgggcgacgtcggtgtatcgacgacagcagacccctattcccagtattggaatcccgccaagtttgcattcatagatagcaaggccggcctatcgctcggctatacaccttggctatctcgcctggtaagcgacattgctctgatgcatgccggaggctacttccgtattgggaatgacaacacccagaccatcggtgcttcgctccgctacttcaccatgggtaagctcacgacgtgggatgcctcaggaagaagtcttggcgtatcgcaccccaatgagttcgccatcgatgcgagctacgcccgtaagctctctcccaacttctccctcgctgtagccctgcgctacatccattcggatcagggaagccgtgagcaaggtgatcgccctgggtcggccttcgcagccgacatcgcgggctaccaccagaagtacatcacgatcggtggggctgagtgcctgtggacaaagggcttcaacatccgcaatatcggcacgaagatctcctttgacggagggacgacttcctccttcatccccacaaatctcggtctgggtacgggactcctctaccccatcgacaaggagaacatgatctccctaaacctcgaggctaataagctcctcgtccccacacctcccacgggggatacagagaagatcgccgactatcagaagacctctgccatcgcggggatcttcaagagcctcggtgatgcgcctggtggcttcggcgaagagctcaaggaaatccgctggagcctcggtgccgagtacaactattgtgacaagttcttcgtgcgtgctggctacagctacctccatcccaacaaggggaatctccaagccttcaccgctggggcaggcttccgtatgagcgccttccgcatcgatgcctcctacctcatctctacgatctccgacaatccactcgatcagactctccgcttcacgctggccttcgatatggacggcatccgcggactactcaagtaatatatatgccacagatacctttccggacgggcttcggctatgacgtccaccgcctcagtgacggctacgagctttggctcggtggcgtgaagatcccctttgagcagggcctcgaaggtcactccgatgcagacgtcctcctccacgctgtatgtgacgccctccttggagcggctgccctcggtgatatcggggtgcacttccccccatccgatatggcctacaagggcattgacagcaagatcctcctcagccgtagctgcgccctcgtgcgtgaagcaggctatgagatcggcaacatcgatgcgacagtagcagcagaggcaccgaagatcaacccacacatccccgagatgcgtcgtgtgatggcggaggttatgggcatccctgagagggctatctcgctgaaggctacgacagccgagcgcatgggcttcgtcggtcgccgcgaagggatggaagcctttgccaccgcactcatcgccgtcaagggagccttctaacgaagcccctatcgtagtagacaaaagcaagcgcgggcgaatcaccattggtgattcgcccgcacttgctttatataggactaagtgattagtcgaacttcttatcaaattggacggatgcttcgcccatgaattccttgatgcgctgctcttcatcgcgcttacagatcaagagaactcccttgctctgagctacgatacagtcattgatcccctggacgacgaccagctgcttctcgggatctccatcgagcgaaacgatattgccctcagcctcatagaagagagccttggtgtggagggccacattcgcacgaggctcctcacgcttgagctcatagagtgagccccaggtaccgaggtctgcccagccaaagtcgacgggaagcaccatgacgttgtctgccttctccaagacagcgtagtcaatcgagatattggggcactcagagaagacttggctgacacggctctgctcctcatcggtagcataagcacccttcacctcgtcgaggatagaggtcagcgaaggcaggtactgatggaaggcatcgaggatcgtctgcacgttccatgcgaacatcccactattccagaggaattccccactctcgtagaagaccttcgccatctcgatattgggcttctccgtgaaagtcttcaccttcacaaagtgctcatcctcacagtctgtgaactggatgtagccatagcccgtctcaggacgcgaggggcgtacgccgagagtgaccagcttgggatgcgccttcacatagtccagcgagcggcggatagcttcgtcgaaggcatcctcctgcaggatcaggtggtcagcaggtgtgaccaggacgttagcattgggattcttcgcatagatatgatatgtcgcccagccgatacaaggtgccgtattgcggcgcattggctccaggaggatctgccctggggtcagctcggggagctgctccagcacaaggtctcggtagatagcgttggtgacgacgacaaagttctccttagggattaccttagagaagcgatcataagtcatctgaagaagggtgcgacctgtggcgaagatatcgaggaactgcttcggcttggcctcacggctatatggccaaaagcggctgcctacgcctccgcccatgatgacacaatagttgtctgtgtgcatagtcttttttactaccggggttagtattactacacaaatataagcattaataccatacgaggcgatagactactggagtaaaaaacaccaagtagcacccgctacaggactgcctcccgccctatcaaaagcagatgcgacttcccctacatattgcacgaaagagaggtcatccagcaaagcctatctacctactagataaagcaaccagtactagttcacacttcgagcagtactggtcacttcgctgaccagtactggttcgtttcgcctctccatagggcctctatctataaggctattaaaggggctggttgatacgaaagaagcaggctcaatagaggcgcaggaaatagaatgccagcagcccttggagcaggacgaagacagggacgagataacgaaaacgcttgtgcgaagtcttatgattccacacgaccatcccaaggcaggcaccgaaggctccaccgaaggccgccaagagaaggagcgtccgctcggggatgcgccagcgtcctcctcgagcacgccacttatcgactccatagacgacaaaggtcagggcattgaggagtaggagtactaagacgagatcagcgggctgtagtccgaaaagctgcatcatgcgatactgacgagctccagctcgaagatcagggttgagcctgcggggataccaggctgcgcatagcgaccataggccagctctgcagggagatagacttcccagcggtcaccgatacacatctgttggagagcaatgatccagccctcgatgaggtcactcaggcggaaagctgcaggcacatcaccctccgtactatcgaagacctgcccatcaatcgtccgccccgtatagtgagccgtgacgatgctacgaggcgacgggtgcttaccatctgcacgtccttcggtaattaccttgtaataggctcctttgggcaagggcttaatacctgcttcttgagacttcgctttgagccaagccttattagcctcgatgtattcacgcttcttcatacacattcatttataggccttcgcgacgaaggcaaagtaaaccccgcctccacaagtgtgggggcggggctgtgatagggctcctcgacgaagagggttgcctttagatagagtaaaggatgctgatcgactcgtgattgatcacacgattgatagcctcagcgaagatattggctaccgacacgatgtggatcttatccgagtgcttacgcagggggatggagtcggtgaagatcatttccttgagcgccgaagcattgatacgctcggtagcaggatcactcagtactgcgtggctggctacagcacggacactacgagcgccattctgcatcatcaggtcagcagccttacagatcgtccctgccgtatcaacgatatcgtctacaaggatgacgtccttatccgtgacatccccgatgatcgtcatctcagcgacttcgttggccttagcacggctcttgtggcagatgaccatgggcacgccgaggaactttgcataggagttagcacgcttagcgccaccgacgtctggcgtagcgatgaccgtgcgctcgaggtctgaggtctggcgcaggtagtcgatgaagaccatagaggcgtagaggtggtccacaggcacgttgaagaagccctggatctggtcagcgtgcaggtccatagtgatgacgcgtgtgacccctgccgtgctcagcaggtctgccatgagcttcgccccgatagatacacggggcttatccttacggtcctgacgagcccatccgaagtaagggatgaccgcagcgatgtagtgtgcggaagcacgcttagcagcatcgaccatcaggaggagctccatgatgttgtccgaagagggataggtggactgtacgaggaagacatccttaccacggatactgtccttgtagtagacagagaattcgccatcagcgaaatgctctacctgcatatcaccgaggttaatacccagggcttcggcgatctttccagccagttccagcgaagcagagcctgcgaagatggcaatgttctttgtgttgatactcatttgacgtgtaagttgattggggctcaccactatggagagtcatttaattgtttgtgttacgcttgagcacgagagccgtacgtgcggggaggtagaggcgcagcggtgccagagctgagcaggctgcagtctcagccttctcggcaggctgcgtggcatagatgagactgtcgtcgataaggccatagccaccaaaggccttgctgtcggtatcgatgacgacggtatatgcgccctcagggacattgataggatagtcgacgtgagagcgtgtggggtggaaattgaagacgaagaggtagtccccacgcccgaaagccagagtcttatcctcctcgtggatgtgatattgctcaatagggagtgaggggaaggccttcaccgagtcgatgaagcgaaccatcgcacggtcgaactcctgcaggtcatggtagaggagatctgcattatctgcgaggctccactgacggcgtgcatagtggtaggaccagccattaccttcgcgtgggaagtcaatccattcggggtgaccgaactcattccccatgaagttgaggtatccaccattcatcgtggtggcagtagcgagacgaataagcttatccaaggcaatagcgcgatccgtgataagcgtgcggcttgagcggctcatgtgccagtacatatcggcatcagcgaggcggaagatgagcgtcttgtcgcccacgagtgcctggtcatggctctcagcatagctgatggtcttctcatcttcacgacgattcgtgagctcataccagatcgcacctgggctccactcctcgtcggggtgatccgtgatgagcttcgtccagaagtcggggatattcatcgagaggcggtagtcaaagccaaagcctccgtcctcaatgggagcagcgagaccaggcataccactcacctcttcggcgatcgtgatcgcgtcggggtagacgctatggataagcttattggccagcgtgaggtacgccatagcatcggcatcctgatgaccattgaagtagtcagagtacgaggtgaagcactcgccgaggccgtggttatagtacagcatcgaggagacgccgtcaaagcggaagccgtcgaactggaagacctccagccagtacttacagttggagaggaggaagtggatgacattgttgcgcccgtagtcgaagcacagcgagtcccaagcgggatggtcaccacgaggaccttcgtggaagaagagcgtgcgagagccgtcatagcatgccagcccttcgacctcattgcgtacggcatggctgtgcacaagatccatgatgaccttgagaccagctgcgtgagcagcatcgatgagtgccttcagttcgtcgggcgtaccgaaacggctactgggtgcgaagaagctcgatacatggtagccaaaggagccatagtaaggatgctcctggatagccatgatctgaatggcattatacccgaggtcaatgatacggggaaggaccttctcttggaactcacggtagctacttaccttgccttcctctgacgacataccgatgtggcactcgtaaatcataaggggctcttcggtgcgagctggacgtgcgtgacggaaggtatagctatcctcgggtgcccagacctgagcgctgaagatacccgtcgaggggtcttgcactacacgagtagcccaggcggggatgcgctcaccactcccatagccccagtggacaaagaggcgatagaagtcaccgtgacgcattgccttgtctgagatacagatctcccagttgccatagtcatcgacacgcttgagcttccacaccgacatcgtctgccagttgttgaatgagccaatgagatgcacactctgagctccagggaggaactcgcggaggatccagcaccccttctccttatcatggtgtaggccatagtgaaggtagccgtcggcaaactgctccaagggaatatctccaccttgagtgatcgagcgctcacgggcatgagtgaactccatgcggcggcggatacgctcttcgtagggcttaagccatgggtcatttgctgctaacttcgtcatagtctttgtgcgttgaggccagttgctggcgtgaagtgatgaggagtggacctatttgagattgagtattaaagtggaaggaagctgtgcaaggagctcttcacaagtatcgaaggactcctgccaataggtgtagctgacgaccacgaggtcacactcggcggggacagagcagagcttatctgtcgtgataatctcttctcctggatgagaattgaggctctcacgtgcgactccagtagagaggacaatgcgcagtgtagcctgattattttcggccatcgtgcgggcatagggcaagagacgtaggtcgctggcactacgcacatacacgaggatatgcttcggagaatcaaaggaacggctcagcaggatacctaccgagcagggagcacggtgcacgaagaaggccatcttgtcgcgcagcatgctatggatggagaggaggctctccgtggtacgcatcggcaacgagcccatgaagcgactcatctgctgacgcatcgagctggcttcacggtcatcttcatccgaggaaagacgtacgccagcccctacgatcaggaggttgtagcgctccgaagtgagcttattcagcacggcactctctacctcatcagctacgacatagtcggtctcgagaggctgctccagctcttcggcagcacggaggatggggcggaagctgtcttggtagaacttatccgcctcgatgggattgatatccttgtcagtagtgatgtgcagagccgtcacattggggtgagcgccaccacgacgcaggagctgattcgtcagatgcagcagcgtagcccccgaggaaggacgaccaaaggagaggagcaccttagctcctgcctgcttatcaatggtctcgatgcggtcacgcttacgcccctttatgcggatgaagacattgatcagatgcaccatcggcatcgtcatcaccgtcgtgatcaccgtcatcagcaccagcaccgcatagatcgtcggaggcaggatcttcatctcatagccgatacccaagacgacgagctccatcagcccacgcgtattcatgaaggcaccgagatagatgctgctcttagggctttcgccagagaagcgtgcagagacataggtaccaccgaccttcccgacgacagcgacaagagtgaagagcccgaggagcacccaggtagcagggctatcgatcagccccagctctgtctgcaagccgctcgacacgaagaagagcggaaggaagagcatcagcgagacatcctcgatcttgtcggtgagaatcttgcggaaggagagatcctctggcatgacaagcccgagcatgaaggccccgaagagggcatgcatactcagcagctcggtgatgtaggaggagagcaggaggaggatgaagatcaccccgaccataccatggctgatgacctccgtattgttgtacaccttccccgctacacggaagagcgggcggatgatgccaaacatcaccagcaggtagacaatgaggaagagtagattgtagcctgtgctcaagatactcccactctgcgagatcgcgatgatcgcagcgagcatgagccaagcggtgatatcaccagcagcagccgtagagagggagagcttcccgaggtgcgtgcgctgtagatggttctcctggatgatacgtgccagtacagggaaggccgtgatactcatggagatcccgataaagagagcaaagggcgtgaagttcgttaggctcgaggcatactccgcatatatagcgtagctgagtggtagggagagtgcaaatgggatgaagatcccagcatggctgatgataaggctactcttgagctgacgacggatatcccctaagcggagctccataccgatggcaaacataaagagaatcagcccaaagttgcttagcaactggatattaggaaggctctccgtagggaagagtgcaccaaagagctctggagacacatggccaaagagcgatggccctaagagaatccctgcgacgatctccccgatgacggcaggctgacgcatcttgcggaagacccatcccataagacgggcggcaaggaggataataaggatctggaggaggagcaccccgatggtggagtgtacatggtgtctgacgctggtactgaagtctccgaaggcagaggagagcgtcgcgacttcttcggtgggacgtaatgccgtaggggtaagtgcctcacctaactggagcgtcccccaaagggcggccacagaggcaagcagtatcacgatgtagaagacatagggaagggctccccgctctttaggcatgctgttccgttgtgttgtaagcgcgggctgcggcagatggagggtactcgtcctcatcagccaagcccatatgcaccgccaaagatacaaattctttaggaggtaggcagtaggtcacacacacctccagaggggatcttacctacggtacatcctcctactcagccgctcatagcacatatatctcagcacgcctccatatacattatatatgcacccatagaaagtgctaatatttgaggttgcattttatgattatctttgcaagagattacaattaatacttaaaacgtaaagcaaaacaagcaatgggaaagttcatccaagagtttaaggagttcgccctcaagggtaatgtcatggatatggctgtgggtatcatcatcggtggtgccttcggtaagatcatcacttcgctggtcaatgacatcatcatgcctcctatcggactcatcacgggcagcagcttcagcgatgctaagtacgtcctgcgtcctgccgaactcgatgctgctggcgagactgtcaaggaagcaattgagctgaactggggtaacttcgtccagacgactgtggacttcttcatcatcgccttctgtatcttcctcatgatcaaggccatgaactctttccgcaagaaggaagaagcagcccccgaagcacctgcagctacgcctgaagatatcgagctcctgcgcgaaatccgcgatgagctgaagcgccgcggctaagctactctcccgccctctgtggctggtacagcatcaagcccttctctgagcacctcgctcggagaagggcttttcactttcctcccctaagttggcaagttagcgactaagagtagagcatatacgaggcaatataagtggaggatctaaaccactattcgtttgcagggcgaaccaatagtggtcaatgagtgaaccaatagtggtcacgacgtcgaccagtattggtccgaaagcgaacttatattggtcggagcggagaccaatatgagactattccgagagtcctgtcctctatttagagcgctaaggcttcgcacacccagctccccgatatgcctctctgaagtgaccgaacaagcccttcgccttatcgcgagtattcctcttatcctgcggaggggaaagtgccattctcgtgaagaaaaagtgccttcccatagtggtttttccgtatctatgtacgtagtcttaaagaccaggcacgcaaatccaaatatccacgtacgtagatattagagccacgtacgtagcccaaacttatctaccactcgtccacaacttttatccctatgcggagcaacaacccaatataggtcacttcacaaagctatataggaatcaatccaaagctatatagctttcttcgccatcctatatagctcgacccacatactcatatacatatacctattatgagaccattgtgtaagctcatctcttcattactcgtaccttctttcctcgaaaatcggggtctttaggcagagaagttcgaaggaggaaagtgcaagctgtgaagagatggccttgcgcaatggtctcaatataggttaacctccctcccctcgggagactgctccatgatcctccccaaatggaagtctccttgatcacaactcgaggagcgaacaatctgaggataatttcccaatcaacagtgtccaaaaaagttggcgtatctttggtaatccactcctctcctcatggggagaggcactcatctggaggcgtctcgcctccctaccctatcaagaatacttatgagtaataagcgtaccatccccacctctgagctcatcatcaatggtgacggctctgtcttccaccttcatctgcgtcccgagcagctcgctgaccgcgtcttcctcgtcggggaccccgcacgagttgacatggtcgcttcacgcttcgactccatcgagtgcaatgtatcgagccgcgagttccacaccatcacgggctcttacaagggcaagcgcatctccatcgtcagccacggcatcggcacggacaatatcgacatcgtcctcaatgagctggatgccctggcaaacatcgacttcgagacccgccaagagaaggacaccttccgtcagctgaccctcgtacgcgtcggcacctcgggcggcctgcaggacgagactcctatcggcacctacgttgcagccgagcactccatcggcttcgacggtgtgatctacttctactctgatacggcacgcatccgcaatcgcgccttcgaagaagctctcatcagtcagctcgagtggaagatcgaaggcctgcgcccctacgtcgtcgctgcagacaagagcctcatccagcagatctgccaggatgacatcctgcgtgggaacaccatcgctgctaatggcttctacggtccccaaggccgtcagctgcgcctccctctgcaagaccccaagctcaatgagaagattcagggcttcaacttcgagggctaccgtctgacgaactacgagatggagagctcctctctcgctgggcttgccgctctcatggggcaccgcgccatgaccgtctgctgtatcatcgctgggcgtaaggcacagaacatgaacaccgactacaagggtagcatcgaggggcttattgacctcgtcctcgagcgtatctaagccccctccacagctaaaaaaaatggaggcactttcgctcaaggccctattatacatcttcatcggaggaggctcagggagcctcctccgttaccttattggctgggggacagcacaactcctcggacggcctaccccatgggcgacctggggtatcaacctcctgggctcccttctcatcgggctgctcttggggctgatgatgcgccctacgggactcagcgctgactaccgcccgctgctcatcatcggattttgcggtggcttcacgaccttctccaccctctcggctgacctcgtgaactacctacgtagcggggagcttcttatggctctggcctacctcagccttagcctcatcgggggcgtcctactggcttacctcggccttcgctgggggcgtaccctctgatagtatcctaatcctacgctatgcatagacctctacgctttctcaccctactcctttccctcgcagctctcacagagagtgcccttgctaagcccatcgaccaagcgacagcctcgcagctggcacgccaagtcctccgcgtcggcaagacctccgcacgtagcctccagcaccttcagctcaccgagcgtcctacctactatatatataatgtagggggaggtgggggctttgcactcatcgccaaggacgatacaggaggagctatcatcggctacagcgaccgtgggagctttgacctggagcgcatgccccaggacctcagagcacttttctcgactcttgggcagcctcagcccgctgcacaaggcaagagcgaagcacgcgcctttgcctatccaccaaagcacgggaaggtaatagcccccttagttagctcgcgctggggacaaggtcacccctatagcctcggcaccccgacctataacgacagcgatggcgaccagcagcacatgtatgctgggtgcgtagccgtggctatggctcaggtgatgtactatcatcagtggcctgctcaaggcactggatccaagacgcacaatcagctcggctatcgcgacttctccacaagccactaccgctggagcgatatgcgccccatctatgggaacaatgagcgctacatcggttcggggagcaaccgtcgtgtacgccccgatgatgatccgatcttcacctcggtagcccaactcatgtctgacctcggagtcgccgtatccatgggctacacccagtacgccagtagcacctcctccgagcaggctgccgcagccctctcggcctacttcagctatgatgctacgcctgctctatcggcctcggtccttgggataagcaccatcgagcgccttctgaaagaagagcttgaagcgggcttccccatctacgtcagtgggatgaatcggagtggaggcaagctctatggacacgcttgggtcgtggacggagtagatgccgacgggctctttcatatgaactttggctgggacgggcaaagcgatggctactattccctccgacgcattgcccctgggcaagcagggaatgagtttggtggtcgcaaggtcgacttctcccaagggatacaaatcatcttagcccgtcccaaacgcacgggtacagccccgctctctgatgaggtgaagggcatggggtcagggttatcaagtcactactcagccttcctccgcctgcatggagctggaggcatgaagcgtgctcgcaagaaaagcatcgatgtagacctcgctggcttcatcaacaagggtctccccttcaagggtgactacggctatggactctacgatagcgaagggcatctcctgcgtatctatccctccaagtaccacagtgcagggggcttcaccaaggtcaagctctatggacagatggtcgatgggcagtacatcagtgaggagatggccgagacggaccgcttagctatcgagggcctcgcagcgggtatctatgccctgcgtccgatgagttcgcgcctccaagaggatgggagctggactccctggcagctcatcctggatgcccccaccctgggtcttcgtctcacagagagtgaggtggaggtcatcgaggaggatggcttcgaccgaggcttccagatcatggagcccctgcagcagcccgcactctatcctggtgatgaagtccgtcttcccctcgtcatcaagcatctcgccgccaccagccgcgatatccagctcgtccttcgcctctatgacgaagcaggcaagctcgtcgagggcttccaagaagcagcaccgcttgaactggagttcacgcctatggagatacgtcttgtccacctacctctcaccctccctacagggatacaagcagggcgctatcgcctctcgcttgaggtaaagcatggtgatgggagcagcacctatccgacacagcgctaccagcttcgtgaggagacctatctcacgatatcagctcccatcacaggacgcgtacaggccgtaggcgctcagatcacagacgccgcagggcaagaactcaagagctaccctgtagacctcactacgggtagtagcccataccttgctgtcagcgtgaagactccttcatccaacacgtctctcggcacgatacgcctctacctcgaggatcccacgacggggagccgtacactctgtgcaacacgtaccctcacccactcgagcttctacacgatgaccaacatcgtcaagagcgatgccctcacccagcagcttctcggcaacctcatcacaggtagagcttaccgtgtcgtggcagaggtcacacagggtgagacggtgtacagcgcttgggcacctaacgagcctgccgtctacgtgaccttcatcacaggacgaagcccagagacgccgccgacagctgtggttcgtccagccgagcctgcaactgaggagctgcctgagcctgagccagtacctacccctacacctcagccacagcctacgcccaagccgactccgacacctcagcccacaccagtgcccgtgcctgatcccaagccagagcctaagccgacacctactccgactccgaaggaagaagcgcagcaggaagggcaacttcgctactttcccagcgaaagccgtgtcgaagtcttcggcaagcagctccttcgtctggaggtctttgacctgacgggcaagcgtcttatactccataccctcacaggtacgacacaggcaaacctttcgctcagcaccctaccacgcgggctctacctcgtgcgcgtgctggatgggacgagctactcgacgcaccgtatagcccgatgatcagacgagcggtattggctacaacggatattatcactacctttgccacgcaattacagaagtcttacccacgggcaacaggcttcacacaggcggctgtggtgtaattggtagccacgtcagacttaggatctgatgccgcgaggcgtgggggttcgagtcccttcagccgcactgaaagcaggcgatctactctatcgatgagtaagaccgcctgcttctcttttatacgtgggacgctatttgtttggtaaatgccctaccttggcttacctttgcgcccgaaagaactaaggacaaaggggtgctcaccgcacatgatggtgagctgagatgataccctcaagacctgacccagatcatgctggcgtagggattgttcatcgaccattatctaccctttccccttcagctctgcattactatgccaatgaataagtattgtatgatgaagagaaaaacaacgctcctctccaccgtggtcctctcggccacagctaccttcctagcctctccctccatagctacagctacacagctcgcagatagtctcagcacgcaccgcctcgaggaagtgcaggtaaccgctacacgcgcttcagcgaagacacctatgtctttctccaacgtctcgaaggggcagctgctgaagtcaaaccttgggcaagacgtcccctacctccttctgcagactccttccgtcgtagcgacgagcgagcctggtatcggtatcggctacacctacctccgagtgcgcggggtcgatgccgctggtatcaacatcatgaccaatggcgtgccgctcaatgactccgagagccaaggggtattctgggcgaatatgccgaacttctcctccagcatccaggatgctcagctccagcgtggcgtcgggacatcatcgaatggctctgctgccttcggtgccagcctcaacctccgcaccgaccacttctccatgacgccaaccgcctccctcaccctcctcggtggatcttacaataccttccgccgtgatgtccatgcctctacagggcgcatcgcagggcattgggccttagaagctcgcctggggaagacgaccacggatggctacatcgaccgcagtggtacggagggcacctcctacttcatccagggaggctacttcggggagaacaccatcctcaagctcctctccttcggtgggaagcagcgcacaggtatcgcttggaacggacttagccccgaggaagaagccgtctacggccgacgctacaactccgctgggcacatgaatcccggcagcacacctcaagatgctcgctaccgatataatacggacaactatgagcagtaccactatcaggcgcagctcacccagcgcctgagtgagggcttgatactcaatctcacggcacactataccaagggttacggcttcaccgacgagtaccgcacggggcgtaagctcaaggaatacggcctgaaggaattcgtcctccgtgatgagaatggcgctgctatcctcggcaaggatggcaaggagcagaaggtcaaaaagatcacgctgcttcgtaccaagtaccttgacaatgatttcgcaggaggtatcgcgacgctcgactataagttcgatcgcctggagctcactgctgggctgtctgctaaccactatacaggcgatcactacggtgagcgccttcccgtcactccctacccttacctcgtagagcccaatgagcgctactacgaagacaaggcaaataagaccgatctctcaggcttcgtcaaggcgaactatgaggtagtgactggtctcaacctctttgccgacctccagtaccgcttcatcgactaccgcatcgcaggtactatcgaccacttcgtgaagaatagccagggagcgatggtagcgcaagagatcgacctcaagaagaccttcaacttcctcaatccgaaggcagggctcttctatcagttcgctccccagcatcacgtctatggctcggtcgcagtagctcaccgagagcccaatcgtaagaactacaccgaggtcagccccaaggactacccccgtgctgagcgcctcacggactatgaagtaggctacggcttccgcagtcgcaccttcaccgctggtctcaacctatattatatggactaccacgatcagctcgtgctcaatggtaagcagagcgatgtcggcggtaagctcagcgagaacgtagccagcagccaccgcatgggtgccgagctcaatgcctcatggaagatctgccccatgcttcgctgggatctggctggtgctgtcagtcagaatcaaatcaagcagtaccacctctacgcttggagtgatcaggcaggggccgaagtgctcacgacctacgaccgcactcctatcgcttactcaccccagctggtcctaagcaatacgctgacctttgcgcatcgagccttcgaagcggccctaacctcgcagtacgtcggtatgcagtacctcgacaatacggggagccgtgagcgtagtctccccgcctaccatgtggccagcctacgccttggctatgagctccccgtacacttcgtgcgtagctggagcatcagtctgcagatcaacaatctcttcgatgcacgctactcaagcaatggcggagctgactacaccttcgacaagaagggtgcgatcagcagctacacctggacctatcctcaggctggtatccacgccttcctcggcacgaccatcacgatataatctctacctttacggtctatggatctgaccactctcctctccttcctctcctcgcacgtcctggagctcgtcacgctcgtcgtgtcactcatctggctgtacctcgagtaccgcgccagtatctggctctggcccgtaggtatcatcctacccttgctatggataccgatctgctatcagagtcatctctacggcatgctcgctatcaatatctactacctcgtgaccagcgtcatcggctggatagcatggctacgtaagggcaatgccgagggagaagaagtccccatctctaatattccggcgaaggctggggcgatctacctcgccctggccttcgtaggttacatcgcgctgctcttcctccatcccttcatccccgagtggaagctcccttgggcggatggactcatgacgatagcctcggtcatcggcatgctctggatggcacggaagtggcgtcagcactggctctgctggatcatcgcgaatgctgctggcttcatcgcactctacggagcggaggactacatctcctccttcgtctacgtcgtgaacttcgtcaccgccttctttggctaccgcaagtgggggcagctgatgaagcagcccgacaagcacaccgtctaagtagttccccgacaccatgcgcacctaccctcgcttcactcaggagaccctcccgcagacactcgtcctcgcgaacggggccttccccaccgcccccacgccccttgcgctcatcgaccactggatactaggcaaggagggctacagcctcacctgctgtgacggagccgtcaataagctccgtcgctataccgaccgtctgcccgatgcggtcatcggggacctcgactcggtatctcctgcactcaaggatctcttagcggggcgcatccagcacttctcagatcaggaaaccaacgacctgacgaagaccttcacctatctccattctcgctacgggaagcaagccatcaccctccttggtgccagtggcggacgcgaagaccacctccttggcaacctcgcactcctccctacctatgcgccccttgtcaaggatctcgtgatgctcaccgacgaaggccacttcctcctcatcaccgagccctccacgatcgacgtcttaatcgggcagcagatatcgatcttcaacttccagcggacgcccatcagcctcggaggagtgcgctggccccttgtggagactacacttcctgcgctatggtgtggctcactgaactgcgccatcgagaatcagatcaccgtccacaccacctcccccatcctcatctatctggccaatgtctgagcaggaagccctcgccatcgtcctcggtgcgctggatcagctcacgcctcggcgcaccgatccgcccacactgatggagctgactctatgccttggttatagtgaggctgagctggacgaagccttcacaaccctcttcgcttgccccgcagacgaagctctcgcgctcttctctcaagaagcacttcgcctgtgccctgcggagttcctctccgactaccccacacgactgactctcgatagtagctacacaggggtcgtctcctactgcttcttcccctatcgcttcggtgaattgcttttagccactacgccactcgggctatgctacagcagtttcaccctcggcgactggcagggggcttacgctgagctacgccagctctatccccaagcctcacacgacctcaaagtcgagcacgaatacctccagcaggctattcgctacctcaaagccccgacgacggaggctcttcccccactccacctcatcggcacgctcttccagcggagcgtctggatgagtatgctcctcatcccagaggggagccacaccagctaccaaggcctcggcgagaccttcggcatgcctcaggctgcccacgccgtcgggtcagccgtaggagccaatcccttagctcccttcattccctgccaccgcgtcctgccgaaggagcacaccatcggccactatcactggggtgtagcgcgcaaggcaatcctcctcttacctgagcttctcgcaccgcaggcatagtcctctgcacccttatcacaccaagcccccgcatcggttgcccaagatgagcacgatgcgggggctaactatttatatccagtccacgaacaaggaaatcgcacatggtaaactatctgaggcttaggtgtgttctcctattacccatttatttaagtatttaataatataccccgatgagtatcaatctacctccttcttctctcccacgcgtcgtcatcgctggcgggggctttgctggtctcaagctggcacaagcccttgactcttcgctcttccagatcattctcatagatcaccacaactaccaccagttccccccactcatctatcaggtagcctcatcgggtctggagcccagctccatcgccttccccttccgtgctgccttcaagcgcaagaagaacttcatcttccgcctggcgaacgttatcggcgttgagcccgagcagaagcagctcatcacctcggtgggcgaagtgccctacgactacctcgtcttggcatgcggtggtacgacgaactacttcggcaatgagcaggtcgccaagcatagcctgccgatgaagaccctctatgaatcgatgaacctgcgcaacgtcctcctgcagaacatcgaaaaggcgctcgtctcagacaagcccgagacccgcgaagccctcctcacggtagcgatcgtcggtggcggtccttcgggagttgagatcgcaggggcactggcagagatgaagcgctatgtcctgccgaaggactaccccgacatggagacggaccagttcaagatccacctcatcgacgcttcgccccgcctcctgcaggcgatgagtgagaagagctctcgcaccgccgccgaaggccttacctctcttggcgtcgagatccaccacaacatgatggtcaccgactacgatggccgcgtgctcaccctcggtgatgggacgaagatgaatacccgcacagtcatctgggtcagcggtatcatcgccaacaccatcgagggtatccaggccgactctctcggtcgtggcaagcgtatccttgtcgatggctacaacgaagtacagggcgtacccgacgtctttgccctcggggaccagtgcctcatgacggctgacccagcctaccctcaggggcatcctcagatggctcaggtcgctatccagcaggcagccctgctggccaagaacctcaaggcacgcctcacgggaggaaagcagcagaccttccgctacaaagaccttggctcgatggctaccattggccgaaaccgtgccgtcgcagagattggcaaggccaagtggggtggcttcaccgcctggctcctctggctcgtcgtccacctgcgctccatcctctcggtgcgcaacaaggtcatcgtcctcctcaactggatctggaactatgtgacctacgaccgctcactccgcctcatcctcaagcgcaacgtacccgtcgatccctaccaggctcgtcaagagcgtctcgccaaccgagacacgcgtgtagagtaggtagctgacatttcctcttactgataaggcccaccctgtatcgtgcagggtgggccttatcagtaagatatcgccttgacgaatatagatcagcgggcgaagctatataggacgcgaaggcaagctataggagactgttgccgcgagtcctatcctctatttagagtgctaaggcatcgtgcgcccagctccccgacatgcctctccgaagtgatacacaagcccttcactttatcgcgagtattcctcttatccagcggagggaaaggtgctgctctcgtgaagaaaaaagcgccttcacgtagtagtttttccgtatctatgtacgtagtcttaaagactaggcacgtaaatccaaatatccacgtacatagatttatcgtccacgtacgtagtccaaacttatctgccactcgtccacaacttttatccctacacggagcaacaacctaatataggttcactctacataccactattggttcatactcttcgcctccatcagagggtagtacccatagctacaccttatatttacccctcatagcgtcacgatctcaagtccactctcttcagcagcttgtcccaagcgtagcacggacacttaccccatcagccttggagcgaaaaatatggggcgcattcccttggaaagtcgtatctttgcccgcgaggctcaatatataagaaggaattgggctatgatgagatattatatatgatcaaaagactttgtttggcttgtgcagggctcctgctcctctcttcatgtggtgagtactaccgcgtgcagaagtccacggacctcggggagcgctactccttcgccaagaaaagctataatgagaagaaatatgggcgtgtcgtgagcctcctcgaagacatcgtcccccagctcgtcggtacgaacgaaggccctcagagtacctatctcttggccgacgcctacctccagcggggcgatgagagcgaagcttcacgctacttccagaactactatacgagctaccccaagggacccatggtcgaggaagcccgcttcaaggctggctactgcctcttccaagcatcgcctgacccacgactggatcagagcgctaccatcggggctatcaaggagctccagtcctacctcgacttctaccccaagggcaagcatagctcagaggtcgaactgatgctctttgagctgcaggacaagctcgcctataaggagttcctcgctgccaagctctactacaaccttggcctctacctcggcaacaactacgagtcgtgcatcatcacggcgcagaatgctctgaaggattaccccttcactaagcacaaggaagacctgaccttcctcatcctgcgagccaaggccgagatggctgacctcagcgtccccgagaagctgcaggagcgtctccgcgacgtcatcgacacctactatgcctacctcaatgacttccccaacgggacgtacacgaagcaggcacagaagatctttgaccgcatgaacagcaagaaggtcagcgaataatccacccacgaagtatcatagagaataaagaatatgcctaagtacaaaaagaatgtaccgaccaacacgattagccgtgacatggtcagcctcagcaaggacacggagaacatctacgagaccgtgatgatcatcgccaagcgtgcgaaccagatcgcccaggagacgaagcaagagctcgaagctaagctgcaggagttcgcagtctacaccgacgatcagcaggagatggtcgagaacgaagagcagatcgagatctcccgccagtatgagcgcatgcccaagcctacgctcatcgctgctaaggagtacgaagacggcgagctctaccacaacatcgctgggcgcaccaagaagtagtcccgacaagctctctatcgctatgtggcaacgcatacagacagtatggctcctccttgtggggctcatcatgatcacctttgccctgcaggacgtcgcggtcttcaccctccccgaggggcaggcttgcgtcctcgacaactggcgcatctatagcgctgtcgacagcacgacgctgcacagcacctgggccatcggtgtactcagcatcctgacgggctgcgcatcactcgggctgatcttcctctacaagcgaagaatcctgcagatgcgcctgacgatcctgacgatgctggtcatcatcggcgaactcatctacatcgcttgggccagctctcagttctgctcagcgaacggggcgaccttcgccatccgcttcccactggctctgccgatcatctgcctgcctctgctctacttcgcctcccgccgtatgatctacgacgagacgcttatccgagcctcacagcgcctacgataatccccatcagcgaagcacctccctctacatatgtgagacgggaggtgcttcgctgctttctcccccttcccctcctatcacatctattactctgcaatcatgcaattcgattcgctacaagctatctcccccatcgatgggcgctaccgcggccaagtagaggcactcgcctcttacttctctgaggaagccctcatccgctaccgcgtacgtgtagagatcctctacttcatcgccctctgcgaagagctcccccacctccgtggtatcctcagcaaggaccgaacggatcgcctccacgatatctatctgagcttcaccaccgaggatgccctccgaatcaaggagatcgagcgcgtgacgaatcacgacgtcaaggccgtcgagtacttcatcaaggagaagttcgatgccctcggcctgagcgatgagaaggagttcgtccacttcgggctcacctcccaggacatcaacaatacgtccttccctctgatgatccgcgaagctgtcgagcacgtcttcttgcctgagttcggtgggctggtcgatcagctccagttctacgctacggagtgggagcacgtatctatgctggcacgtacccacgggcagccagcctcccccacgcgcctcggtaaggaaatcgaggtctacgtctaccgcctgcaggagcagctcaagacgctcgaagcgctgcctcacacagcgaagttcggcggagctacggggaacttcaatgcccatgccgtagcttaccctcagcatgactggaagcgcttcgctgcagactttgtccgtagcctcggcctcgagcgtgaagccttcaccacgcagatctctaactacgaccagatggctgccctcttcgatgtgctgacgcgtatcaacgtcatcctcatcgacctggcgcgcgacttctggatgtatatctcgatggactacttcaagcagcagatccgtgctggagaagtcggctcatcggctatgcctcataaggtcaatcccattgacttcgagaatgcagagggtaacctcggcatcgcgaactccatctatggcttcctcgctcgcaagctccccatctcacgcctgcagcgtgacctcaccgactcgaccgtactgcgcaatgtcggtgtgcccttggcacacagcctcatcgcactgaagagcctgcgtaagggtctcggaaaggtactcctcaacaaggatgccctctaccaagatcttgagcacaactgggccgtcgtagccgaagcactccagacgatcctccgtcgcgaaggctaccccaagccctacgaagccctcaaggaactcacgcgtaccaacgcagccatcacggagaagtccatctatgacttcatcgaaggcctcgctgtcagcgacgcgatcaaggaagagatgcaccgcatctccccccacaactacacggggctctaagccccccacccagcttcagcggacgccccccgcccactgagcccataaaacaagtgtacccccgagtagctctatcgctactcgggggcacacttttatataatgtggtgggccgtcttcgccccccaacctaccaaaaacgaatagggactgtctcccgacagcccctactctctgttaaccttaaatctaataccatgaaaaacacactacaaaggtacgacatttttttatactaccaaataaatctataaaattgattaaacttcttctgtgaagggctactattcccgcatagatatagcgtattccttatgcacacatacagagtataaactctatgtatcaacgaattgcatcaagagaataaggtgaatccacctccatacgaggagataataccttcacaaatgagcacagaaaaattttcttgagcagcgagaaagagtaccgaatccgtccctttttcatccgctgctccccctatcagcggatgattttcttcacttttgaggtaatagaacgtataaaagcaccacgggcctacggctaaaagagcgatccccactatggtctggtgaccatagtggggatcgcttcattgtacccagagccgggatcgaaccggcacgaactttcgtccattggtgtttgagaccaacgcgtctaccgattccgccatctgggcttatcggatcggctgcaaagatacgacaattattagaagtagccgatacggattcattgcactactactatgcggtgcattccactactgctccatgcgcgaagcactattgctttccactcgtagcactactggaatgcaccacataccaatagtggtttgcaccgagaccaatagtggttcataccgcatactactattggtatgagtctgtctgcatgactctccggataagcccttgtagcttatcaagataagcgccttccacttcacaagatccctacgagtaatgtgagagccctacagatattccacctctgaggcagctttcatatcaaaatagagatacattagatagactatttccttatatttgcagttgtatacgagcattcatttaacaaagtaggcaataatacacgccaccaagtttcagaaaagaacctaatcaatgagcaatattttctcaaaaatcgcacagctcttctccagcaacaaggaaggacggcacccccaaagcaccgaggcacaggcatcatcttctcaagcaactacctcccaaagcgtagcctcttgctctcaccctgcaattaacttgacacacattgacctacccaccgccccctctttcggcacgcgcagcctcgaagaagtacgggcggcagctgagggtggcgacgccgaagcacagtacctcctctttgactactacgcttcggggcatggggaagaaagcgatcgtcctgccttcgaatggctgaccaaggctgcagagcaaggctatcccttagcactctataccagtgctcttatccagatcgaagaaaaggaaggtacagctgtacctccacaggcgctcttctacctccaagcctctggagagcgaggcttctccgatgcctatctccagctctatcatctctatcacgatgggaagggcgtagaggccaacgaagacacagctatcaactacctccgcaaggctatggaggctggttcggggacggcctatctgatcgtcgccaagggcttcctccctggcaatggcggggggcccattgactacgacgctgcctactactatgctgagcaagcagcgcaccttggctcttcgcaggctgtggagctcatcatccatctgctcgaagagaaccttgcctctggcgaccacacggagctcctgcgctactggcgctgtcagcttcgccccacacattagcaataactcaagctcgatgagcttacacactacaagaactcctatacgtacaaagggtactctccacttaaggagagtacccttctattttattagtcccctgtagatagaggacaagtaggctatatagtagacggactttattcctctgcctcatcaggccagccttgagcacgcagacgaagctctgcaccatcggaggtaacgaggtagcagccctgcccaggactggtcacatgaccgatgatatggataccatccagttccttcaggcgatccagctcagcaagcggaatagtgaagatgagctcaaagtcttcgccaccattcatcgctacggtcgtcgtcgacatattcagctcctcagccatgcgaagcgtctcgatatcgatcggcagacgctcctcatagatacgcacccctacaccactctccgtcgcgaggtggaggagttcggaggctaagccatccgagctatcgatcatcgacgtgggacgcagtcccttctctcgaagagcaaggatgatatcttggcgggcttcggggcgaagctgacgctcgaggatgtattcatgctcggcaaagtcaggctcgaagtctcccttctcccctgcgaagacgcgcttctcacgctccagaagctggagtcccatataggcggcaccaaggttaccactgacgcagatgaggtcggtaggctgagcaccactacgatagacgatctcctcttcgcgagcagctcccagacaggtgatgctgatgcagagccccgtgaggcttgccgaggtatctcccccaactaagtctaccccatagcgactgcatgcaaggcgaataccagaatagagctcctcgagatcctccacagcaaagcgagccgaaacaccaatagagcaggtgagttgctgtggatgtccattcatcgcgtagatatcagagaagctcccgacagcagccttatagcctaagtgtctgagcggagtataagtcaagtcaaagtgaataccctcaagaaggaggtcagtcgtcacgagtgtctgcagtccttcggggtacgcgatgacggcagcatcatcacccacaccacggcgggtgctctcatgctgtatggggaagtctcgggtcaggcgcttgatgagcgcaaattcgccgagcgaagagatctctgttcgttgcatatagatatagaatacttgggataggcaccgcaagcgcagcaccttcgatgggagaggaaaagccccttagcgcagcccttgcagggagggaggcagggaattagccgccttacatatcatctcacgaaactcctgcggcttgtagagtatctgcgtttcgatcgggaggaagtacagttgcttgaccagctcttcagggagttccccaaggctatcggtgaagcgcaccgcatccttctccgtgcagacgatgtagacaggatgccccgagtgctgctcacacagctcctgccagcgctcaccgatcgccgtaaagtcctttcggcggaactgatgatggtcaggatagacgagctggtcaatcagctcatatcgctcggcaaggaaggagaagaagagcccaggcgaggcaatccccgagagagcgatgacgagtgcatccttagggagcggactaccagcctcaccgaggagcgtacgcactgcgcgtggatgctgatagtggatgcgtgagaagaagatctcctgatgcgcatagagatcaaggttgcgctgcatgatacgcagcttgatcggctgcatatcatgtgggcacttcgtcaggatgatgcagtcggcacgatagcgtgccgtagcaggctcgcgcaagcctccgagggggagaagctcatcatcatgcagctcacgctgggcatcgatgagcaggatattgaaggagggctgcacgtagcggtgctggaagccatcatcgaggaggaccacctcggggcgctcttcctcagggagtgcgagtaggtagcgcatagcacggcgacgattgccatcgacgacgaagcgcacctcgggatacttctgcttgatttgcttgggctcatctccgacttcttcagctgtcgaggtcagggtcacctccctcaagccacggctctttcgcttgtagccacgactgatgacagcgatatgatattgcttacgaaggatcgagatgagtagctcgacatggggcgtcttccccgtcccaccgacggtgatattcccgacgcagatcaagggaatgggataagactgctgcttgagtatgccttggttgaagagaaagttgcgcaggcctacccccagaccgtagagccaggagagcggatagaggagcggattattacttttcttcattacaccgaggtgaggagagggagggtgcgagtgatgcttgcgccctccctgtgattagtaggatgtatattcgtagggcagacgtgcgaggatccccgtatagcgatagccttcgcggaagaactcacgtatcttcttctcttcgtctgtcatgaagaagtcacgtagacgtgccgtgaagcgctcagtagtctttgaggcgaagagctcttcgaggaagctcgtagacgtagagccatagtctacgctgtagcccttatgaagcccagcgaggcgtgcagcaaggcggatagccgtctccagccccccaagctcatcgacaagcccaagctccttcgccttagcaccgagccatacgcgcccctgaccgacggagtctactgcttcgactgacatatcacggcccatagcgacgcgcgagaggaaggtcttatagccgcgctctacctccatctggatcagctgccccttctcgggagtcagcggacgcagaagcatagccatcggatcactcatactcatatctgcatagggcgaagtctgtacgacatcaatgcttaccccgaccttacgtccaagctcagacgcatcgggcaggataccgaagatcccgatagatcctgtgagcgtcacgggactggcgacgatagcatcagctgccgaggctatgtagtagccacccgacgccgctacgtcccccatagagacgactaccgtgcgcgactgactcagctcacgtacctcatgccagatctgctccgagaggaaggcactccctccaggcgaattgatacgcaggacgacagccttagccgtagggtcatcacgcagcgcacggaggtcacgtgccaagtcgctcgtgataccatcgctactgagcgggctctctgtgatctccccttcagcaaagagtaccttcacagcattgtccttatccgtgcgtcccttatccagcggatcaggctccataaggaagtccgacagcgtcaccacagggatatcatcaggcgaagcgacatcgaggcgctgcgccataagatcttctacatcgaggcgataagccaaagtatcgacgaggtgagcacgcacaaaggtctctgcctcaccgaaagctcgaccgctatcagcgaaggcacgcaagctgtcgacgggtaccgagcgcgaagccgagatctcacgaagcatgaagtcccacagcccgttgaggtagaccgagatctgctcacgattgggttcactgagcttatcgagcataaagggctctacagcccccttataagtgccgaccttaaagatatgtgccttgaccccgagcttatccaaagcctgacggtagaaggtcggtgctgaagccaggccgacaagccccaccataccctgagggttgaggatgaccttgtttgctaccgacgagaggtaataggccttctggtcataggagtcggcgtaggagatgatgaacttccccgaggagcggaagtccttgagtgcctcacgaagatctgccgtcgaagccatacccccactatagccctccacattgaggtagatacctcgtatgcgagagtcctccttcgccttacggatgctggcgagggcctgcgagagcgagatcggcttctcgtctgagcccatcccagggatgaagcttgagagttcgtccgtagtgacgatctcggagatcgaactaagatcgatcttcagcacgcttccatcccggatctcagtcggagtagatcccgaggctaaagcgcctacgaagatgacgatgaaaaagaaaaaggcgaagatcgagcaaaggatatttgccgcgatgaagccaacgaaggaggccaagacggtcttccagaagcctaagggctttttgggttgtaagggttcttccattggggagtgaggccagagagggaggtgatagatagtgcagggagtgcgcttagacacttagccctttaggacaaatatagtgaatcctcactattttgatattacagtagccctcttgtaggctcgtggcatggggcttttgcaaaggaagatctccccagatacgactatcccccgtgcggtgactggcaccacacgggggatagtatgtatgtaaggacagctaaccgctacttatctgccgcgagagcacgctccttcgtccaccacatggggggaacgtacttatacagctgagcttgcttcttcaattctatgaagttcatatcatccttgctgtagtcaggagcaaatatgggacgctcatagatatatccgttcttcgtagagagggcagggatggtgctacccgtgctggtatcttccatccagtggataccgagagcaggagtcttcacacgatcgcggtcgaagtagtagctgaagcgatagccccagtcaagagcttcgtagcgatgacgcatgacccagtctgagttatgattgatctgcatctccttacgaggaaggttacgccccggcttacggaagaaggtagccgtaggatactgagcacggatgccattggtgtaccagaagaacgcatcgaccgtctctaccgtgcagttaccacccttcgtcttactacccttattcgagtacttacgcacgatgcggtggcgtgaacgatagtgctgcccctccacatcaaagcgaggtgcatagaacgcttctgcgtacagacgctttcgatcatccccatccttaaatgtttctgaggcgatattaaagaggtagacaagcccatcacgatttctgaaagcatccatcatacccttgttcgtcacagaggccgtgtagaagacagctgacttatgagcaggcaggatacctctttgggctccatagattgaatgcttttccagagaagtcgggcccgacttcagcagggtgggatcagggagcagagaagcctcgtaggtaggagaagaggaatacccgccatgatagtcgaagcgctggatgtagtaatccttcaggttgatcgggaagtccgtggggttgtaaaattcccatgccgtagcagcaccataggtcccaccaccgatgaagacttcggtgatgataagatcccccataggagcagggatctcgatgggaagacggtgtaccttgcctgcagccagctgcttgacattccacttcgtcgtgatctcatctgcagtagcccccagagtcggatcgtaagcatcggtacggaactccatcagcatctcacgacgaccactgaactgtgcaggcacagcccagaagtaatacgtacgcttctttcctctctcgacatcgccctgctcgaagtacacacgctgtgtcgtaccagcattctgagtcgtcttccacttgggggcagagttattgttgctgtccgtctcatagtcgaagagctggatagccccctctgtcgtgaaggcgcccgtcttgagcgtaacctcatgaggagagtaggtcatattcccctgcatgttatcgatcgtagcgccgatcattgacccgaagaagtggaaggtcaggtcgtcagcatagtactctctctcacgcgtcccagggtttgtcctgacatgaagctgcgtgggggcaaaatacataggaggagtgtagggatcacccgagtcgtagaaggagcgagggccaggcaccaaggcaccaccagtagcatcaatacccgagacaccgatagcaccagcgatgatgaccttttccttagcgggattgagccacacaggagcgtttacatcgacactcgctttgtagcgcttcccttctttcttgatgatggtgagcgaactcttaagcactgtaagagcactacctggagcatcagctcgcttaaaggcgagatagagcgtctccttatcgccgggattccagacgagcttcaagccggcgtgcttaccattcacaatgttttcctggataatcgtacgaagatcatccgaggggagtccttcaatatcaacgtcaaatgtgattttctggccattgctcgtctcctcgcttgtagtagaagtcgtcgcaggggtctcatcattcttacacgcgctcatccccacagtcaaagctataagcagggtcgcgccgtaaatacgtaataggttcatacctttttgtacggtaaatttacttgttaggaaaatggttcgaaggtatcactatcaccttcttcaattgtatctggcagcgtaccactaccagagacaaggatactctgcccgaagatcatttcgaggagttcggctcgaggagcctcatatgggcagtggaccccatatgcttcagtctgtctcatcatctaagaaaattacagttacaccccatgggagacgacgtaactctcccggtaaaggctattaaaataatacttggaagtcttaatttcggagcgtaaataccccaggttaatgcaagaatatgaagagaaacgtcaaaatgtataagcagaagaaatctccagcacgcacaattgactttcaccttacacactaataacgaagagtatatttgcaaagtatatctctcggagaaataataagaaattttctccgttaatgtacgctgcgactaagatattataccaataggattcggaaaatcaccagtgtaccccagactttataatgcccgtcaaaccccttctacaagagggtaaaagaagaagctgtatggtggaggagtatcaacctatattggtcacggagtgaacctatataggtcaacagcgcgacctatataggttcacttcacgagcaatataggttcacccagcgaccaatatagattcgcatcactatgtcgtagagaggcatacgataccttatgcaagagggctatacctatatacaattatcccccgtgtagtgctcagcaccacacgggggataattattgaatatatagagctttgctaccgactaacggtctgcggcctgagcacgctccttcgtccaccacatcgggggagtatactgacgtgtcttggactgcttcttcagatcatcgaagtccaaatcgcccgtacggaagtctggagcgaatagaggtctttgcttgaggtagccattcaggtcattattctccgaaacgtgagctcctgttgacacatcatcaagccagtgtgccccatgggcaaatccaccaaggcgctcacggtcataatagtaaccgaagcgaaagccccaatcaagcccttccttacgctcacgcatgatccagtcagagttggacttaagctgcatgtacctacgtggcaggtctcggccaggcttacgcataagtatagccgtaggatagtgggctggatagtcatcttcgtaccagaagaaggcatcgacaggcaccgtattgccattctcattcttcaccaagaggtagcgagtagacttcttagagtaaaaggcttgaggccaagtctttttggggttattgggaagcatgaaagatgccttgaggtctgaggcaaacccgataacataagctaaaccttcacgcgcctctaacctttgtttcgaggggaagagcatgactccagtggacaaatagacgacagacttatggggaaggagcttataggactctgtacccaacttatttgctttgtctatatggactgcatcaaagcccgccttgaaagcgagaggcgtaataaaatcagcatcagtgggataactcccatcagagcgtagatcgtaacgctgaagggaatagtcacgaaggtctactatcgcattcgtgggattatagaactcccaagccgtagcaccctctcctccgccgatgaagacttctgtaataatcaactcaccctttggcgcagggagctccagcaaaaggcgatgcaccttacctgcagcaagctgcttaaccttccacttcgtcgtaatctcagcttcagtctcctcaagcacgctatcataagcgtccgttcggaactccatagtcatctcacgacggccgtcaaactttgagggaacagcccagaagtagtatgtacgcttctcccccactgcgacatccccctgctcaaagtagacgcgcttcagggagtctacagtctgcttcgtcgtccacttaggtacggacagaccatcgctattcgtctcaaggtcaaagaggctcatctccccttcggtcgtgagagcatcggtctgcatcgtgatctcatggggagagtagagcatattgccctgcgtattgtcgatcgtagcaccgaccatcgcaccatagaagcggaaagtcaggttgtcggcatagtaacctctcaccccaccctctacctttgagtgaagtcgcgtaggagcgaagtacataggagggacatagctcttccccttgtcatagaagtagctcggacctgggactacagcgcgccccgtaaacccgtcaatctccttgacaccgatagctccagccacgaagacttcatcctgctcggggtcaagacctgcgggagcattcacatcgacacgagctttgtagcgagtcccctcccgtccgagaatagtgagggtactttgacgaacgtagagcgcgccaccgacagtgcccggggtgcgactctccgtcttaaaggcaagccagagaacctctgtatcccctggatgccagacgaacttcaggcctgcatgcttattgccatccatttcctcctgaaggatcatacgaaggtcttctgctggaagcccttcgatatctacattaaatgagatcttattgccaccattagcctcttcacttggcgtgggaagaggggttgacagctcatctctcctacatgcactcacccccatagtcaagatgacaagcagggctgtagcgtaggtacgcagtagattcataccatttgcttaataagaatgtgagattagggattgggaaggaaggtgtcttcatcaccttcatcgagagaatctggaagtgagccactaccagagatcaagatactctgcccgagggcagttgggaggaactcggcttggggtgcttcgtacgggactctaagccgatttgtttcgacctgtttcataggcgaatgggataatttcgccccatgggagatcgatgtaactctccgcatggagacattcaacgatacttgcgaacccatagctcgggtatgcgtttacccgatacttggtgcatgaaggtaatgaaaagtaaaaatatcaaaccactacatcattcatacgctacaacaataagggtatacacacgtgggggggctacgcaatccgcccagcctcactctccatacctccatgatatcacccagtgccgttaatgatacatgcgggtagtatatacctatttatctcccctccccatgcctaccatacgccacactccagaagagggctacgcccagatatgactatcccccgtgcagtgataagcaccacacgggggataatgttatattgtagggaattgactacctactaacggtctgcagcctcagcacgctccttcgtccaccacttaggaggggtatacggacgtgtcttagactgcccctttagttgggtaaagtccatttctccagtagtgaagtctggagcaaagagaggtctttccttgaggtagccattcttgttgttatctatgggaggattggcccctatcgtctgatcatcaagccagtgagccccatgggcaaacccactcaagcgctcaccgtcgtaatagtaaccaaagcggaagccccagtcaagcccctccttacgctcacgcatgatccagtcagagttggacttgagctgcatacgtggacgaggcaggtcacgccctggcttacgcataaaggtagctgtaggatagcgagcaggagagccatcctcataccagaagaatgcatcaacaggtaccgtagcacccttctcattcttcaccaagagatagcgagtagttctctttgagtggaaggccttgggccaagttgaccttgcatcataaggcgtctgaccaccaccaaagccgatgatataagccagccccttacgtgcctggaatcttgccttcgaaaggaaaagcataaccttagtagacaaatagacgactgtcttgtgagggccgagtttagacgacttcagcgtcttaccaccagccgagttattcacattatctacatgaattgtattaatacccagctcaggaatgagaggcgtagtaaagtcggggctcgatggataactcccattcgacctttgatcataacgctggagcgaataatcactcagatcaacagcctgattcgttggattgtaaaactcccaagctgttgcatattcatcatccccgataaagacctcggagatgattaactctcccttcggggcagggatagccgtctggaatcggtgtaccttacccatagcaagctgcttaacgcgccacttcgtagagatatcatcagcggtctctccaagcttctcgtcatgagcatcggtacggaactccatagtcatctcacgacggccttcaaacttggttggcacagcccagaagtagtacgtacgcttctttcccacagcgacatccccctgctcaaagtagacacgctgagttgtattagcatcctgcgtcgtcgtccacttgggtacagactgattgtttgcatcagtttcgaagttaaagagatttatctccccttcggtcgtgagagcccctgtcttcatagtgatctcgtgtggggagtagagcatattcccctgcgtgttatcgatcgtagctccgaccaccgctccatagaagcggaaggtcaggttgtcggcatagtagcctctctgcccattctctaccttagtacgaagtcgcgtaggagcgaagtacatcgggagggtataggtttcgccagcgtcgtagaaatagcgaggcccagggatcgaagcgcgacccgtggtagcgtcaatacccttgacaccgatagcgcccgctacgacgacattcgctgccgcaggatcaaatccgttcggcgccgtgacatcaacacgcgccttatagtggttgccttccttcgcgaggatggtgagcgagctctcacgaaccgccatacgccccgaagccgactgagaagacccactctcctgtttgaaggcgagatagagcttctccttatcaccgacattccaagcgaacttcaggccggtgtgcttattgttaacgatattctcctggaggagcagacggacttcgtctgagggaagaccctcgatctcaacatcgaaggaaatcttttggccactgctggcgacctcgcttgctgcaggagtcgtcgcaggtgattcttcattcttacaagcactcatccccatcgtcagagcgacgatcagggtagcaccgtagatacgtagtaaattcatctctatacagaataaatttatagggttattatgatgcgggaaggaaggtatcttcatccccttcttcgagaccatctggcaacgtaccactaccagagatcaggatgctttgccctaaggcaacaccataaacttcggcccaaggggcctcatacggggcacgagccccactggtttcaatctgtttcatagattaaaattagaatacccatctcccttgaaactacagtgcaactcttcataaaggagactatctgaaatacggaagaacctccattccgaggtagtataccccgcaattggagtagcaaatgtaggggaaaagataaaacatgcaaacaggcagaccttagcagataggtgccaatcacccctcaaaccactgatcaacaagagatttacccatagtaaaataatttagaaagacggccgttattacgacgacttgggggctttcgcatcaaaatcagaagagcatatcaaggcagcgtctaccgattattgggtaagcttagccgcaccttagagcaccttagccacccttcttgataccatacgcgcaatgcgcaagctcccaattaatagtgccccaggcacgtccagctccccgatatgcccctccgaagtgatacacaagcccttcgctttatcacgcgtattcctcttatccagcggatggaaaagcattgttctcgtgaagaaaaaagcaccttcccatagtggtttttctctgtctatgtacgtagccttaaagaccagatacgtaaatccaaatatccacatacgtagatattagagccacgtacgtagtccaaacttatctgccactcgcccacaagttttatccctacgcggagcaacaacctaatagaggtcacttcacaccgaaagctatataggaatcgagccaaagctatatagctttcttcgccatcctaatagctctacccacgtactcatataacaatatgagaccattgatacgattagcctacggagatcccagcgtatttcatgctactaggagatagaaaatcaccagtccacaaccaaacggcagagaagaaggatcgctataaaagtggtacttttgcgctggctaagcccttgtgaatgggcgaagctccccaagacttcagtactttataatgcaagctttcaattcgtggctacacgatgtcttcatcgccccctcggtgctggagacccttgtatggctcaccctcgtctctgccgtaggcatcctgctcggcaagctgcgcgtgggtaagatatctctcggcatcacctttgtattcttcgtcgggatcctctccgctcacttcggcgtgcgagtcgaccccgagatgaatagctttgcccagacccttggcttggcactcttcgtctacgccctcggtgttgaggtggggccgtccttcttcccttcgctcaagagtcagggtgtactatataatacgttaggccttatggtcatcggcctcggcctcaccgtcgtggtcgccctacattatatatgcggtatctcgatgccaaacatgctcgggatcatggctggtgctgtaacgaatacaccgatgctcgcagccgtacagagcacgatgcaggacgccctcggctctgccggtgcccgccaagtcgctgaccttgcgctcggctgcgccctcacctaccctctcggtgtcgtcgggatgatcctcgccatactgaccctcaatatccttgatccgaagcgccacaagcgcaatgagcaggacaactcccgcaatacttatatcaccgagctggagctcacgaacgaagctctcttcggtaagaccatcctcgaagccgtacgcctcgaggagaagcacttcatcatctcgcgcatctggcgtggtgatacgctgatcatcccctcctcacagacggtactccacgagggtgaccacctcttggtcttggtacaccctgaggacgtcgaggagatggagcagttcttcggtcgccgtgctgagagccgcgactggaaccgccccgacatcgactgggacgctatcgactcccagctcgtcagcaagcgtatcatcatcacaaactccaaggtcaatggcgctaagctcggtgccctacgcctgcgcaatcagtacgggatcaacatcacgcgtatcgaccgtgctggtatcgagatcctcgctacgcccgacctacacctgcagcttggtgaccgcctctcggtggtaggtgaagcgcaggagatcgagcgtgcctcgaagttcctcggggactcaatcaatgtcctcgacaagccgaagctcttcagcttcttcttcggcctcgccgtaggctgtatcctcggctcgatccccttagctatccctggactgagcatgccgatcaagctcgggctcgctggggggcctatcatcgtgggtatcctgatgggggccttcggtgcacgcctacgcatcgcgacctatatgagtaatagtgccacgcagctcatcaagcagctcggcatcatcatctatctcgctggactgggtctggccagtggtgagcacttcttcgagatgatcatccacggagatggcctgctctggattggcttgggcttcctcatcacctacctcccgacgatggctgtcgggcttctctcgctcttcggctataagaagacgcatgccgagactgtcgggatgctctgtggcgtgatggcgaactccatggcgctggactatgcgatgtccatcaacgagtcacgctccagctccgtagcctatgctatcgtctatcccgtggggatgttcgtacgtatcatatctgctcagatcctcctgagcttcttcctctaacttcgactatatgcctcagcaagacggactcatcgtcctctcgggagggatggacagcgtcaccctcctctacgaatatcaggcgaatatcgcgctggccatatccttcgactacgggtctaagcacaacgcacaggagatcccctacgctcgcctgcactgtgagcgccttggtatcgagcacctaacgatccctctcggcttcatgggacagtacttccgaagcgctcttcttcagggtggcggtgagatccccaaggggagctacgacgaggagaatatggctgcgacagtcgtacccttccgcaatggcatcatgctctccatcgctgctggtctcgctgagagccgaggcctaaagcgcgtatatatcgccaatcacttcggtgaccacgctatctatcccgactgccgtgcctccttcatccgcccgatgcacgaggctatcgccgctggcacaagcaatggcgtcgaggtcatagccccctataccgatataagtaagggtgagatcgctcgccatggcaaggcactcggcatcaactacgccgagacctggagctgctacgaaggcggagatgtgcagtgtggccagtgtggcacctgcatcgagcgccgtgaggctatgctcgaggctggcatcgaagaccccaccacctacaaagactaatcacaaagaactcctatccgaatgaagttcatctcctggaatgtcaacggcctgcgtgccgtcttcaccaagggttttcccgatatcatcaaagaattagatgctgacttcgtctgcctacaagagacgaagatgcaggcgggtcagcttgatgccgatctgcccggctacattagctactggaactatgccgtgaagaaaggctattctggtaccgctatctatacccgtcatgagcctctcagcgtcagctacggcatcggcatcgaggagcacgaccaagagggtcgcgtcatcaccctcgagtatcccgacttctacctcgtcacggtctacacaccgaattcgcaggacgacctccgtcgcctcgactaccgcatgacctgggaagacgccttccgctcgtacctcaaggggctggatgcgaagaagcccgtcatcatctgcggcgacctcaatgtagcgcacaaggagattgacctgaagaaccccaagtccaaccgccgcaatgcaggcttcactgacgaagagcgcggcaagctgcaggagcttttggatgcaggcttcatcgacaccttccgctacttctatcccgaccaagcggacatctactcgtggtggtcgtaccgcttcaaggcccgtgagcgcaactcaggttggcgtatcgactacttcgtcgcctccgagcgcctcgctccccgcctgcagggtgccgccatccatacggagatctacggctctgaccactgccccgtagagctcatcctcgactaatctacccagagatcgatccactatcacctatgatcctttgtatagagacctccacgacgaagtgcagcgccgccctcggtcgtggtaaagaaatactcgcttcacgcgaagctgagtcccccgaaggtgggcacgccgcagcccttgcccccatggtcgacgagctgctcgaggcactccgtagtcacgaaggggctaccctctcggctatcgctgtgagtgcaggccctggtagctacacgggactgcgtatcggggcttcgcttgccaagggcctctgcctcggctatagcgtccccctcatcgctattgacacgctggagctgctggcgcatcaagcacagtgcgcactccccgagggtcgtaccgctacgctcttccctctgctggatgcccgacgaatggaggtctatgccgcagagttcacccacacgggagagcgcaagcaagatgacttcgctgcgatcctctcccccgaagcacctatcttcggcgctgctccagaccctatactcatcggtaatggcgcgacaaaggcccgtgatctgtggccagagcacagctatgaagtatgggacgaaggctttgcccccacagcgaaggccatggtcgcccttgccacggcagccttcgagcgtgaagactttgtcgacacagcctactggacgcccaactacctcaaggactacgtcgccgtcatcgcgaagaacaaggtcctcaaccgctaagcacttatgccccaactccccccgaccaatcaagtcatcctcacgggtgagctcaccgaagagccgagcgtgcactatctggcacccgacttccctgaggtgcgcctgcgcctcaagaccgaggaggaagtcacggggcgcgaaggtggtcgtccctacctccagcgactctatcatcgcatcatcgcgcgcggtcaagcagggatagcgctggagcatctgcacactggagcactcatctccatcgctggtcgtatcgagtacgtacgtgagaccgaccgcgaagggcgagtaagcaccagcacagagatcgtggcgctcagggtacgcatccatcagacggctcccgccaccgaccaccagggaggagcaaaaccaaccgccccctctttcgatgcccagcgctacaagcccgccgaagatgaggatccgctgagctaaccaccccaaagacacagcaagaggcacaccaaggtataggtcaaatgaccagccttggtgtgcctctattatataggtagatcagagcgcctgaaggggagtgatgccctcctcaaacaaacgagtttgatacacaaattatcgccttcataaatctctaccatagagctacttcccagacactacaagagcgagcaaaatgaaccagtactggtcggcgatctgaccagtactggttgcgaccgggactagtactggtcacctatacgaagcagtactggtcacttcgtcgaccagtactggttgccttacctactccttttgggtcagttctcctcctaccccaaagcactccgcacccacacctcggaggtaggacgtcccttcccttttccgatgtctatccctccctaataggtggaccgaattccctaaatcaaaaccagacaacgcactcatttccttaaattatataggatataagtagctattgaaaaggaatacaacgtattatctttttatttacatttgctcttgtacctcaccccagccctattctttatataaagggagtgagatgcactgaagcactaacctaccaatgtctctacagattatgggaacccagctacgtaacctcatcgtgagtctgatgctactcatcggctccgtgacggccgtttgtgcccagacgatccttgtccaagggaaggtacttgactccagaggtacgcctctgccgaaggtatctgtcacggtcaagctcgataactccacgcacacgacgaccgacaaggaagggaagttctccctccaagtcccggagaaatccgtcctcgtcttcaccctcacgggcaagaagaccaccgaagcccctgctacaactacccccctcgagattaccctcgaggatggtgaagagcagcagaagggctctacggtgacgactatgcgtcagacgacctctatccagaccaagtactatccgctctgggtcatcgatggtgtcgtctataagcaagacagcacgttcaacaccgccgacctcgcctccaccgacgccaagcgcctcatcgccgcggctctccctgggctctccgagcgcgatatcgagagcttcactgtcatcaccgatgcctcggcaacggccctctatgggaaccaagctaccggtggtgtgatctccgtgcgcacccgccatgcaggccaaggcatcaaccgcttcacctatacctcacagcttacctaccgcttcatcccctcctaccgcgagtttaacatcctcaactcgcaggaccagatgtcggtactcaaggagcttgagggtggtggtagcctctctcccgagaccgtgctctaccagacgcgctacggggtctacgggctgatgtacgacaacgcgatcaagtataagaataaggagtacctacaagacaacaccctcgagggccgcacccgctacctacaagaagctgagatgcgcaataccgactggttcaaggagctcttccagcacagcatccgtcatcagcacacggtctcgctggcatctggcggacaggtatcgaacttctacgcctcactcggtgctaccattgacccagggtgggctaaggtacagtcggagaacacctacttcttcaacctcaacgccaccttcaagccacacaagtactggaccttcgggacgatcgtcaatgcatcctacacccgcgaccatgatggtggagacttcacacccctctcggtagcacagacgctctcccgtacgatggatcccacgcagtactacctctacgagttcgctccctacaacatcaaggaggagatgaaccagaactaccgcgatgtcgatgctgtgaacgtccgtctgcaggcctcgatagcctaccgcccctcgacgaagttcaacgcttcgctcctcggctcgatccagtactacaatgacctgacggaattcatccgcacagagaaatccaacgcctctgagcgcttccgtgcgatgaacaagcgtcttatccgcgaccgcaatagctacctctacaagcctgccgatgacgtctatgccgtaccacgggttgtcatgcctcatggaggctaccgcaccatccaggagtatgcttcacgccgcttcgacctacaggcccgtgctacctataccgacaccttcgctgagggcaagcatgctctgacgctcgtcgggggtacagacctctacgactacctcgagcgtaatggctggcacaatgagtatggggtgaacttcgagatcggtcagctgagcaccttcgaccctatgctcttccactggctccatgatcgtcgcaacaactactactcgcgctcgacgacgatctatcgtaatgtctccttcctcgggaacctctcgtatagctacctcggtcgctataccctcgatggctccttccgctacgaagggacgaaccgcttcgggaagtctcgtctggtacgctggatccccacttggaacgtagccctcggctgggacgtctcaagcgaatccttcttccccagcctcagccccctctcctcactctccacgcgtctctcctacgggatgactgggacactcccctccgtctacaactcctaccagcgcatcaagggctacctacctttccgcccaggcgaccacagctccccctcgctctatatcagtgagcccgctaaccacgacctcacctatgagaagatgtatgagctgaactggaacctcaacttcggactcctgaaggatcgcatcggcgtatcgctcagcctcttctcgcgtcagggtcgtgacctcgtagacatctcctacaatcagggtacggggggcttcttcaagccctacggcaatgtggcctccatggaagctaagggtgtcgagctctcgctgacgacgcagaacgtcaagacgcagaacttctcttggacgacgtccttctcctacgctcgcaatacgaataaggtgacgaagctcctctcgcagtcagacgtctccacgctggtaagctcctcaagtggtgctgcccgcgaaggctatcctctggcatcggtcttctctatccccttctacaagctgtcaagcgaaggcttccccctcttctacaacagcaagggacagatcgagcgtgaccacatcaacttcagtgctacggaggatcttgactacctcaagtactcgggtacgctcacacctaccgaccaaggggggctcaacaatagcttccgcatcggcaacttcacgctgagcgcctatatcctctactccttcggtagtatcaagcgcctgccagctgagttcagcaccacctactacgactacgaggtcctcgggcatgagttcaaccgccgctggaaggcccctggtgatgaagagcacaccaacgtcccctccatccccacggcagaccagcgtaaccgctaccccaatctctcgcaggcctacacgacctacgactactccgacgtacgtatcgctcgctgcgactacatccagctgcgtgacgtatcactcggctactccatccccaagagcctcctcacgaagagcttcctctcctctgtcgatctgaagctgcaggcctccaacctcttcctcatctactcagataagaagctcaacggtgcgctcccctacgcctatactccacactcgctcatcttcacctgtacggtgggtatgtagtcatcgaaatacttagaagctatgaagccaatcacgattctaagccttggtgtcacgctcgtcctgtcgatgacatcatgcaacaagttcctcgatgagaacccctactcctcgctcgtcgagcccgacaatgcgagcaagatagagaagctccttggtagcgcttactcgacctcttcgattgcgtacctcacggagctctcctctgacaacatccaggatgacggggtgaataacccttacacgaatcagttctgtgagaaagccgcctactgggaaaccatcgtaaactctgacgggctctatgatgcgccctacctcatctggcagaatacctataactccatagcgcatgccaacgaagcgctggaggatatagaggctctcgggggggataaagaggagctacagggtatcaagggggaggctctcttggctcgtgcctatggacacttctgtctggccaacctcttctgcctgccctacgacccctcgtccagctccacggatcctggcattccctacatcaagaagcgcgtagtcaacctccagcccaactaccctcgcggtacgatggcggagacctatgagcagatcgctgctgaccttgaggctgggattccacttctggagaagtattcgaactatacggacaaggagaagaagttccacttcaccgcagcctctgcccatgccttcgccgcacgcttcttcctctactatcagaagtgggcggaggcgatagcacatgcagacaaggtgctgggctccgatcccaagctcgtcctacgcaactggaaggccttctacagcatccctcgtaccgatgcctccttcgcactggcctactacgacatcagcaaccctgcgaacctgcttaccgtccccacctacagctactacccatggctcgtgacgggtgggacggcctactacaatacgcgcttcacgcagtcgcaggagctgacgctcaccgagaccctcttcgcaaagaacatctggggtactaaggatccctattggttccagcccttcatctataccgagggaaatatcaacaagacggtccagcctaagctccccaccttccccagtaatagcatccagacaatagagacacccttcaccaccgacgagacgctgctggtacgtgccgaagctaagctccatctgggtagcagtcactacgcctctgctatcgaggatatgaacctctggactacgaactacctcaacgacggggagaacaactcacgccagaagaccttcacccaacaggagatcgtcgccttctactctgctctccccatcgactccgaagggaaggcctcgatccgcaaggcgttcaatgcgcacttcaccatcgcttcggatgaggagaatgccctcctgcagcacctcctgcagtgccgccgcatcctcaccatgcacgaaggtctgcgctggcaggatatcaagcgcttcggtatccccatctaccgccgcctcaataatggctaccgctacatcgtccaggacaagctccctggtcgcgatcctcgccacgccatccagcttcccagccaggcgacgaagggcgctatcactcccaatccgactaccaactaattgactacgcgctatgaagaagctatttctcccccttgcagccctcgtactcacagggctcacgggttgcgacgctgatatagactatgtacaacccagtcggcaggtcgtcgcgagcacgacagtcagtagcttgcctcgcctcgaccgctatatccagcaggccttcgcgaagaagtacaatgtcgatatcgcctaccgctacgatgacaaggtcacagaccgccgctatctcctcgctccagtcaaggaagagaaggcgctggagtacctcaacctcatcgagtatatgttcttccaggtctacgaagcctctactcccgagggctatctacagacccacacaatcaagtatctgaacctcttcggttcctcaggctacgccatcgaccgccgtatggctggtgcagctccacaggggatgatctggatctacaacatcaatgagctgaatacgcagtacacgggtactgtgcgtgcggactacatcagcgtactcttccacgaatcggctcacacgcttcacgaagagcgagcctacccacctgagttcgacaagctctccgcactcgagtatcagaagcaggatgccttcagctactggtggcgtacggggcagaatgcgagctatgccggcttcgtcagtgactacgccagcaccgatgctgacgaagacttcgccgaactcttcgcctactacatcctcgacagcgacagcgagtgggcagaccgtctcaagggtgccgaaggcaagaaccgctccgacgccaagtataccggtcgagagatcatcgagaagaaggtggctatcatgaaggagtacctccgctccgagtactctgccgacctcgacaagatacgtgccgaggcccagaagcgcctccctctggtcgcatcaatggacttcaccaaatatcctaacggctactaactatgcgctactaccatatcttggccttaggcctcttcacgctcttcacatcctgccggatgtacgaggacatgcccagtggtgataactacgtctcgacagctatcgccaaggacacccagagcctacgtcagctcctacgctccagtgagcatggctggatgctgacgctcgtcccgggaaagggacaatacggtgggctcaacctcagcctcaagttcacctccgacaacgaggtcacgatcttctccgaagagtcgcagactcctgctacctccagctaccacttctctcagaatggtggggtacgcttgaccttcgacaccttcaatgatgctctgcaccagtattccaatcctcagtgggggatccctgtagcttacgatggcgacttcgacttcacggtcctacgtgtcagcgaagatgggcggacgatcaccctacgcggtggacatacgcagggagagatgcagctgacgcgcgtcgatgagaatcctaatagctacttcaccaagatcaccgagagccagcaggctctgaagggtaaggcacttgctccccttcagctcggaggcaaggaggtcgctgtatcgatcttcggctttgcacgccagctctgggtacgctatgacaatgagcagaagctgctacccttcgccttcactgacaaggggctacgcctgctgacgcccttcaccatcggctcagataccctccgtacactggagctcaatgctgataagacggccgtcacgacacaggacggcaagcagacctccagcctctacacagggacgtatgacctctcggagcagtacaccatcctctcctatgcgagctcggcgacggcaggtactgatgcactgaacctcttcacgcaggtgcaggagacgcagcagggtgacgtatatcctggtagcttcggcacggacgtgtacttcggtcgcacgagtgccatgatgccgaagatctcgctcttcttccagatcacctactggctggataagagttgggggagctactacatggacttcacgtcgatctacggacagccctcgcagttccacacgacgcgcatcatccagaaggatatctcttggctcttcggtcaccgcgccttcgactggtatctacagtctgtcacaagccactcgccctactccatcgagccgatctcgggtgatgcagaccatgtacgcatcagctcggtagcctcaccctcgacctactggatgcaagcaagtgtccccacgccccactactaatcagtagagacgcattcacataaaaagccgaggcggtgccccacgcatggggcaccgcctcagtgctttttagagagtcaggaaaggactacttgaagggcacgaccttgtagatcgatgctttattctcaagaagctctttgactcccttctctatatcttctgcagtaccatatgtatcttcgggatcaaaatccttacagccagcgaggaagtcatcgaagtaagcattccagtctgcatacttggcctgtgccagaggtacgagcgaagagatgtaagcatcgacttcttcgcgagtcgtgtagccagcacgcagacctgcccatgcgatatagacgccacgcccccagtcccaagccttgtactccctgtctgaagatttgagggtatccagcagttctttaaggcctacgctatcggtgacaccccaatctttacgcagcatcgtgacaacagagtcgacactttgacctttatatgggttgataaagtattccttatagccttcaagctggctgagagcttcactcttgagctgcgcatcaaaagcatctacaccatcgtgatcactatagaagtatacaccgcccagcagcgtgggacgcagtgcatcgtaatcagccgtgttgtcaacgcatgaagcgagggcacagactgcggctacagccaagagggctaccctgaagaaattcttgagcatatgcaaaatagtataagtgttgttttgtctatcttgactattgaaatagttctatacgaaggaacaaaattaatactaacgacggcacttagatatttctcttctctgaagggcaggcttgagggcgaaacctatgcataccatagagttctatcccttgtaatcaaggagacgctcagcatcggcctgctccctactcgaattagtagagatgcattcacataaaaagctgaggcggtgccccatatgtggggcaccgcctcggtgcttttagagcgacaggaaaggactacttgaagggcacgaccttgtagatcgaagcttcattgtcgagaagatccttaacaacctcctccatttctgctgcgccaccggattcatcctggggatcccatgccttacgaccagcaaggaagtcattgaagtaagcattccagtctgcatacttagcctgagccagagggaccaaagatgcattgtaagcatcgacttcttcgcgagtaatgaagcctgcacgcagacctgcccatgcgatatagacgccacgagcccagtcccaagccttgtgctcaccttcgccagacttcagcttttcgagctgttccttgaggccagcaccatcagtgatatcccaagcagtgctcagtatcaaggtagtgacactgatatcgtcgtcttcaaaaggattggtgaagaactccttatagcctccaagcttgctgagagcttgactcttgatctgcgcatcgacattatcgacaccaccaaaagcagcatagtagtacacaccacccagcagcgtgggacgcagtgcatcgtaatcagccgttttgtcaccgcatgaagcgagaccacagacagcggctacagccaggagggccgccttgaagaaattcttgagcatatgcaaaatggtataagtgttgttccggctatctccaccttggaaatagctctatacaaaggaacgaaattaacaccaataacgaggcctcatagataacatttcctaacgccatcgtatggaaggaaagtaggagaggcacaatatgatgccacccacatacagcgcagccgaggagcccactgatgggcttctcggctgcattgttcagttagtccggctctgtctacgagcttactcgccgtagtacttagccttgagctctgcgaccgtaggatcgacgatgtagtcgtcgtagtccatgatcttgtcgatgatgccaccaggagtgagctcgatgatgcggttagctaccgtctggatgaactcatggtcatggctggtgaagaggacgttgcccttgaaggtcttgagcgtattattgaacgcctggatcgactccaggtcaaggtggttcgtggggctatcgaggacgagcacattcgcattcttgagcatcatgcgcgagatcatacagcgcatcttctcacccccagagaggactgaggcgctcttgagaatctcctcaccggagaagagcatacgcccaaggaagcccttgaggtaaacttcgttggtgtcggcagcgaactgtgagagccactcgacgaggttcatatccgtattgaagtactccgagttatccagtggtaggtaggcttctgtgatggtttgtccccattcgtaggtcccttcgctggccttctctacaccattgatgatctggaagagagcagtcatagcacgagggtcacggctgatgaagacgatcttgtcgtccttctctacgttgaagttcagatcgcggaagagcagcgtgccatcatcggcataagctgtgaggcccttgacttcaaggatcttgttccctgggtcacggtctggagtgaagatgatacctgggtagcgacggctactggccttgatctcttcgatgttgagcttctcgagcatcttcttacggctcgtagtctgcttactcttagcgacgttggcactgaagcgacggatgaactcttcgagttccttcttcttttcctcagccttcttattctgctgctgttgctgacgcagagcgagctggctggactcgtaccagaagctgtagttaccagcgaactgctggacgcgaccgaagtcaatgtccaccgtgtgcgtgcagaccgagtcaaggaagtgacggtcgtgactgacgaccagcaccgtctgctcatactcggagaggtagttctccagccaagtcaccgtctcaaggtcaaggtcattggtgggctcgtcgaggaggaggttgtcaggcttaccatagagcgcacgtgccaggaggacacgaaccttctccttaccgctaagctccttcatgagcttgtagtgctggtcttccttgataccgagaccgctcaggagcatggcggcatcgctctcagcgttccagccttccatctctgcgaacttatcttccagctcagcgacgcgattgccatcctcatcgttgaagtcgggcttagcatacagcgcattcttctcctccatgattgcccagaggacgctgtgccccatcaggacggtatccatgacggtgaaggcatcgaaggcgtggtgatcctggctaaggaccgagagacgctcaccaggaccgagggtgatgctaccgcgcgtaggctcaagcgccccactgatggtacgtaggagggttgacttaccagcaccgttggcaccgatgatgccatagcagttacctggggtgaacttgaggttgacgtcttggaaaaggactcgcttaccgaactgtacggcgaggtcgctgactgtgatcatattgcttctggtttatttcttcttatctgcttaggagagggcgcgcgaagtaaatcaggggattggctacgtaaaccctactataatatgtagctaccgtaggttatttatgccatggatgcccctcgtactccactaatatgggtacgcaaaggtaatactttgcttttgaatagcacgtatttacgctaccagggctgacgcatgatgtttcttccagctgattgaagttggttagctttgttccatcaattgttatccttcaagttatgggacttccaagcctcatcagtagcctcagtctgattgacgaccgccgtagcaataaaaacaaacgctaccccttgcctcttttgctccttatcgccttctgtacaagtatctctaagcatgactcttggtacaccatacaggattatgcccaagcacatgaggcaagtcttagggagctttaaaagctgctcttcggagaggagcttgagcatgtcacgcccaccccacgataccctcaatcgagctcttcagctcatcccgcaccaagtcttcaaacaagcctatcaagactggatctcagccctacttcggtgggatgatgaaactcgtcaaatctgcattgatggcaagaccatgcgcggagtcaagaagcttagccctaacaccaagtcacacatcgcatcggcctataacactcatcttcagctggttctctctgtggatgcagtgcccatcaagtgcaacgagctggagtccatccgtaggctcttggatgagctggatgtatacctcggggaggacggctggagcaagcgcgcaggcgaagcgcccaagaacatggagctactggccaagatagacctcttcatattgcagcgcctcaaggtaaagctgggtaaatcaataccgcgagtgcagatgctgctggccaaactaaccccaatgcagttattcgatcttgagctctagcaaatttcaattgtgtattatgcgttcagccctgggcctagagggatgggatgctttcctgcccttccttcttgtcaagatcaacatcctatggtggcattacgcatcagctggagctaaacaccctagcccatatagcaccagaataccaagcccacaattaacctctgcatcaccccgagttaggcatctagcctatcccgttctgccacttcatcatggctattcgctcgtaatccatactcatcttgtaatctctggaagacttctgcgacattggggtagtcgcacatatgctctgatgctagaaccccaaagtattccgctcgttcccgctcaataccaccaccatcgaaagtcccccgagtagtctctcctcgcttattccacatacctaccgaatacccctccttaagttcttcagtgttgatatcttcgatcgcttggaatatcgtcctttgtggccagtttggagaatcctcagggtacttcgctagcagttgcccaatgtgtatatctgcgacttctagccgatcacactcctcagctaaagccctagcagccttgatccaatccctcagctcggtctcatcaatcgtaccatcctcttgcattcctgggatcttcttccaagcctctagcatcaagtaggatctttcagttgcattctgtatttgctccgcagataagccctcctgctcctctcgctgtcgatctttattattaggttgatacagccaccttagaagctgaacaaagaactcaggattgctggctaactcttcctccaaatgaggtactccaacttgagctcctacatctgtaagtagaagcaagtacaaccactctaacccgagaagtgtcttcttatcaatatccgtcctcttattaagctcttcaaatacgccctctatctcataaccaagtggactttggggttcttgagattcctctgtaccacatcctctcaagatatcaataagcatatcgctagggataggagtcagatggcaccaagcaacctccactgcagaactgaatcgtcgatactggagtagtttacttatgcatacgatgatctcttcatccgtgaggccattaaagtagggtctcattcgtagccaatactctcgctgtacaccttcgccaagggaatctatatagttccacagctcctgccccaaacgcacgggaaaaagggcattcgccacagctttatcgctatatcccttctccaatagttcttgcactagggcctgcatccaggagaacttctcgcatcttagcttctgggagatgaatccatgagtaaagtcaatgagaggagtgtcatcctccagacacagccacacgctctgcagatcttgctcatcttttatcaccttagctaaagcctctcctaaaggataaggatgcttaacttctagcctcaaccttaagactccctctaggcccagctctcccaagagttcctccacagcacgctctcgtacagtagcctttaactctgttatttcttcagtggtaagttctttatgagaacaggtaatagcacttggtacgagaaccttataataggcatcttcattaaaaaggtacatacaccttgtttgcacatcctcgggttgtagctgattgtaaagctgctcgaaaggggacagctcttccctcctcaatgcccaattagcatcaggatacagcttgtgtttattcaaaacccttcgcagtgtatgccatgctagattcttctcatgtctaatctcacctacattctcttgagcccactttaatatccgctcccgatccctcggcatacagcctggtgtagcttcgataagatcagagaatctagtctcatcaccaccacatagactgataagcatatccaccacttccgagtatacatcaaagcgttcttggtaagtgtagcttaggtctgtcgcctcccagaacattcgccagcgcatcctatgtgtgagggaagctgtctcagaagaaaagcttggcaacaaactcttcaaaagcttccatgagacatctacatctctacgaagcatctccctcaagatctttaccctctcttcataggaagctaacgtttggtgatgcctggccttaaagatttcctttaggctatttagaggtctattagctaaactccctccaggatctagtgttgccagcttatgcaagaggaggcacgcagtcttaaaatacgacggcatccaagcaagcccttctagggcccataataaacctgtatgagaagcctcaggaacaacaaaccctggctcttccttaaacatatccatgatctctggagattcgtctgagagggagagactcacagactctaggaagacctgaggggatgcttcggcaataagtggaagctccctatttatggagacccacattgcaccactagcatttgacaataggcctccaataatcctgtctacccagctctgtgggtctctgagactaactccaacctgtggtatcgatatcaggatcaaagactgagctaagccctctcttacccagtctgaatacgtcctctttttactgatgtcgtctagtagatccatctgggattctaggactgaattccccgaatgataggcctgaataaagcactcttcgagaagctggaaatcccgctcaagtaagtggacagatatgctcctccacaagtctagaggtgaggttaatctccaggtctcaccgatcttcttcagaggtgactccgggagattaagccatttggctaacacctccttatatttggcatagctcgttccagaaagcttctctaaaagctctatatccccagggtagctctcatcccatcgaccaaggagaagtgcaggtactatctctcgaataggctgagtttttatccaagttgcgccatagctaggaaagcctaggagcttcttaaggatcgtgatgtcgtgccccgattctttcgtaagcgtagaggctttagatcttgatagcccacttgcttctaaagcttcaatgagggcatctctatctaccgctggcagtgtgatcggatccggactaaacacatcgtctgcgcctaatgggactaagacatgatgcccgcacctcactgcacgactgaagagacctgcattatcgaacctaacaatcagattcaaagcatgctgcatcgataagctgatacttcggaaacgatcctcatggtcgataataagtgttgtagaaaagaatcgaccagacacctcggagtcactagccttcatagtagcaaggataaaggcaatagcctcacccttcgtagatgctcttacccctatgatgcttggatccccctctagtagctttatcaacgcttctcttgctacttccctaccagcaagcacacaatctggagttagttccaactgccttgagcaagaccactcttcccagtattcgtctgccgttataatcccatcagaagaatatacaccagcatacccctgagatgcgaaccatcgggatacagctggagcttcatcaagccactgcgctaagcttatgccatcatagacgatcacatccttccacttcttctcctctttcttctgactaacccactcttccttcttcgtccatgtccttggagtaacaaagacgaatgtagcatcgtgaggagtatatccaagaggatcacctgtgcgcttctcatagtcagcatctgctttcttcttaggatcccgatctgtacccagctcccacaaggatattcctttggggacgtatctagtcttctccttactatctacaattccatcccatccccctatataggtggcactaccccagggaatatcaaccttagtatccttagcggtagttgctcttatcagccttgagataagatatgggaagttcgcttttgactctggcgtatcggcccaagaagcaagttgatctctggtaatcatcattatataaattttcaatgtaacagggagagaccacatttggtatcacccccatgctaatttagcaaatccccttcacctctgtatattcctatagatggtatgaacgcatagtgtactttcctgccctccttgagactgttgcggcagagttttgacctctatttagagtgctaaggcatcgcacgcccagctccccgacatgcctctccgaagtgatacgcaagcccttcgccttatcgcgagtatttctcttatccagcggagggaaaagtgtcctactcatgaagaaaaaagcgccttcccgtagtggtattcttctatctatgtacgtagtcttaaagactaggcacgtcagtccaaatatccacgtacgtagatattagagccacgtacgtagcccaaacttgtctgctactcgtccgcaacttttatccctacgcaccgcaacaacctaatataggatgagggtatgaacctatactgatccgtgcgacaaccgtatagattgactcagcgagcaatataggttcgccccgcccatcacagacatcagtatcctccctgctgtgaggggagcctatcagccgaaggagcacaggccactcagtgctacatgataatgtagtacctttgcaggcacgacccgaagcacggggagcgttatacggaagagagggtgccgagcgcactatcgacacaataattatataagagcaagtcaaggatcgtagggcatgcgccattggcaggtcaatcgtcatttcctcaaggtactgaaggtagtagcatggatagctgctaccctcttcgtcttgctctatctcctccctctcggactcttccgtatccctgctgtacagaaggaggccgccagccgtgtggcaggcctgctcaccgagatatttgacagccccgtacagctggagcgtgtcgagcttatgtcctggacgaatatcgaggcgcatcgcgtcgtcgtcctcgacaccgcagggcgacgtatgctcaccgcagaccgcctcatcggcgggatctccctgagcgacctcatcacccagcaggaggtacgcatcacctctgcccgactcttcgaggcggatctccggctcatccgtgacccgaagacaggccggctgaatatccagcacaccatcgaccacctctccaagcccaagagctcgagcaagtcgatccccgtagacatcaatagcatcatcatacgtgacatgcgtctctccctcagcgaagccgagcgagagcgtctcgtcatcaataagctctctacccgcgtccgccgcctgcgcttctcgaagggctatatcggtggcgccatcgatgagctgagcttcacgacagacaagggcttcaccctctcctcgctcacaggacaaggagagctacaggggagcctcctcaccctatccaatctccagatccgcctaccgaagagctcgctctccatcccgctggctcgtcttgagacgcagcgcaaggggcttgcactcctcgaggagctggagctgggcgacacgcagctcacgctctctgacctcagcatcctctcccccgccctcaaggatcgcaacgagcaggcgaccctgcaggcgacctattgccgcgaagggcttgcagccggacgtgcgaacttctccctacgcctcccccgtcacatcatcctcgagggtagtggtcgagtctcgtgggataacacaggcgaggtcaccagcatctcgacggacatcaccgatgccgaggtaagctctgctgtcgtcggcttcatacgccctcacctccccgcctcttccctccccctcattgagcgtctcagccgcctgcagagcatccgtcatgcggggaagacgcagttcgtccctgggaagtccttctcaggaaagggctacatcgcctcagcacaaggacgctgggactatgatctcacgggaagccttgaaggcaagagcctgcgcaagctcacggggaaggcctcgacccaaggcttcgacctcacccctatcatcggcgatctggcacccgtaggctcggtagctacgactattgacctcgatgctacgagtagcaccggcacccttgaggactggcagggcacgctacagatggcactcccttcggtcacctaccgcgggcagaccctccgtggcacacagctcgccgtcacccccgtcggtgcacgccgtcataaggtgcacctcgaggtcgatgacccagcagcctccctcgctctcgacggggtggcaactttctcgggccgtgccctgcatgccgtagaggctgatctccaggtgcgccacctgcagaccgacctcttcgggctcaatcccaacagcccccgtcagacgctctcgctcacggggcgcttcaatatggatgagctgaacatcgaccgcgggcagggacgtctcgctatcgatcatatctcgctgacctcaccacagcgcaccctctcactggatgagctgaacatcctcttctcgggcaaccccgaggagacgcgtatgatttacctccgctcgccctacctctcggcgaccctacgtgggcactatgtgctgagtgcgctgatccctgacctacgtcgcacgctctatcatcacttcccctcgctcgacctcgctcaaagaggaggcgcgcgtagcagcgagatctcaggtacagacttcgacctctccctccagctgcacaagatccccgaggagtggcagcaggctctcaagctacctatcggcctcgaggaaggggcagatgtacgggcctcttatatcggtgccagccactcgctgggcctacaagcctccgtccctaccctccgcctgggtggtcatgagctacgtggagcggctctgagccttgaggacggagaattcaagctcacgggtgaggcacgtctggcaagcggcgcacagatacagggcttcggcatgctgacgaagatcctcaccgacagcctacacgtccagcttgacctggggcgtgaagtcaagagtaagctccacaatggcttcctcaatatcggtgcgtccctacaccaatacacacagagcgagaacggccgtccagcactcggcttcgacgtcacgctcgatccctcgaccatccgtgtacacagcgacacgtggagcgtcgcacccgcgcacctctccctccgaggcaaggagcttcgtgtcgaaggtcttgatctggcctcctcagagcgccgcatcagcatcagcggcgcactcagccccaatcccgaggagcacctcaatatcgccatcaagaagatcaacctcctctacatcctcgagtcagcaggcgtgggcttcaacatgatcaacaccgacctcacgggctcagctacggcaagtctccaaggcgggaagatcatcgctacggctgctgtcacttcgccagcactccatgtcaagggcgtcgatgtcggcgcactgaaggccgacctcaccttcgacagcggtgtcggaaatatcatgatcgatggggacgtcaaccagagcgaaggcggacacagccatgtcacgggctacatacgccctgcaggtggcgcaggtattgacctcaccttcgaggcagagcgtctgcgcgctgacttcataggtaagttcatggacacgctcttcgatcatgtacaaggccgtgccacgggtaagatacgcctcttcggggtcttcgaagagggcgtcaccgtagagggtgaagccgacgtcgaagatgggaatatcggtgtgcgtctcctcggcacgagctacagcttctcgcaccgcctgaccttcacccccacctcgatcatcttctccaagatcccgatgcgtgatgatgaggggcatacgggtatcgtcgatggggtgatacgtcaccgcttcttcgataacttcgaccttgacctcaccgcctcggagatgcgtggagtgaaggtcctgcagaccgccacgaagcaagcattacctatctacgggacggcctacggcactggtacggctcagatgaagggtaagctccccaagctcctcctagatgtgaacctccgcagtgctcctggtacggacgtcgtgcttgacttcaacaagacggacgtacgcaaggacgagcgtctcttcacctaccgtcctctacgtcctctctctacacaggatagcctcgccttcgcagacaccgtcgcacgcccagccgtcgctgccgagacggaggtcacgatgcgtatggcccttcacgtcacacccgatgcacgtctctccctgcgcctcggtagtagccagagtatgcaaaacgatatcgtcacccgctgcgaagggaacctgacgatcgaggtgccccactcgggttcgcccacgacctatggtagcctaacgctgcgcgaagggcagtacaccttcaacttcgagcagttcgctcgtaagcgcttcaccctcaaggaaggtggacgcctcgacttccgtggtgaccccatggcagctatcattgacctcaaggccgcctacgatctgacagcgaatatcgccgacatcgatgcggggctctctgccctcgctcagcgtaccagcatccctgtgagctgtaccgtccagctcggtggggtcatcacgcgcccagacatcaagctcggcgtcgagctccctggatcggagcccgagatcgagcgccgtatccagtcgctcctcacctcggaagacgagcgtaaccgccagttcctctacctgatgaccctcgggaagttccacaccaccgacacgaagcagggcacgacgacggtctccaacaacctcacctccttcgcgacgacgacactctccgaccagctctctcgactgctcggcaacttctcgaacgatatccagatcggcgcaaacatccgcacagccaatagtgcactcgacaacaccgatattgagctactcttctcaggtagctggctcgatgatcgcctcctcatcaacgggaacgtcggctaccacgacaaccccttcctctcagggaagtacatcggcgaatttgacctcgagtacaagctcaatgctgctggtacactccgcctcaagggctacagccactacaacagtatgtaccagtacgtgcgtcagtcgctgacgacgcagggccttggcttcatgttccagcgtcgctttgactcgcttcaggagctcttctcacgcaggaagaagaagccccagtccgacagcacggcacgccctcaagaggccgatagtctccgcaaataggaccgcctcctccctactccccagcacacgccgtgggagcgagagatgtatgtgccctttcccccttggcaatcgcagagaaaaggcgtacatttgtgagacaagagaaaccctcaaccaaatcataaatatccaatagttatgagcttcctcacacaagacaagctgacgatcgtaggtgccgctggcatgatcggctcgaacatggcccagactgcagccatgatgtctctcacccccaacatctgtctctatgaccccttccccactggcctcgaaggggtagccgaagagatccgccactgtggcttcgaagggctcaacctgaccttcacctctgatatcaaggaggcactcactggcgctaagtacatcgtatcctcgggtggtgctccccgtaaggacggcatgactcgcgaagaccttctcaagggcaacgccgagatcgccgctcagctcggtaaggacatcaaggcttactgccccgatgttcgtcacgtcgtcatcatcttcaaccccgctgacatcacgggtctcgtgacgctgatccactctggtctccgtcccgagcaggtcaccacgctcgcagctcttgactctacgcgtctgcagagcgagctggctaagcacttcggtgtagctcagagcgaagtcgtcggtgcacgcacctacggtggtcacggcgaagctatggctgtcttctccagcggtgctactgtcgctggcgagcctctctcctcactcatcggtagcgctaagctctccaccgaaacgtgggaagacatcaagcagcgcgtcaccaagggtggtgctaacatcatcaagctccgtggtcgctcttccttccagagccctgcatacgtctctatcgagatgatccgtgcagccatgggtggtgctcccttccgctggcctgctggttgctacgtgaacatccctggtctcgaccacgtcgtcatgggtatggagaccgttatcgataaggatggtgtacactacagccacgagatcaagggtagcgaagaggaaaaggctgctctcaagaagagctacgagcacctcgtgaagatgcgcgacgaagtcatctctatgggtgtcatccccgcagtagctgactggaagaccgtcaaccctaacctctaaggcgaagcgcgcacaccgcacactccgactaatagaatctaaagcgcaaggcgactactacagcttctctcacgaagcatgtagtagtcgccttctcttttgcctcgccatgaagcatcgctacactgccttatatccccttgcctttctcctcctcacgctacacatttcctcgccccagctatgggcgcagaggaagttagttcgcgtaatgagctacaacgtggagaacttcttcgataccgaagatgatcccacccacgacgatgacagcttccttcccactggagagcaccactggacacatgcacgctaccagacgaagatccagcatatcgctgaggtcatcagtaccgtcgggggagaagccttccctgacctcatcgctctcatggaggtagagaatgccactgtgctcagcgacctcctccaccgtactaccctcggggagaaggcaggctaccgccatatcatcacgcacggagaggataagcgtggcatcaatgtagcgctcctctattcccccgagaccttccgcctcatcgcttccgaggagctccctattcacttcccctttgattcgctgcgccggacgcgctcactacttcgcgtcacgggcgaggtcccctcgggcgacacactccacgtcttcgtctgtcacctcccttcgcgccgtggcggagcactgacttcagctcgctaccgcagctactgctgcacgcgccttcgtgagcaggtcgatagcttgatggcgcaaggcggagaaaggacacactgcctactcctcggtgacttcaacggcgatcccgaagaagcctctacccacgaagccctacgcagtcgcccctatacagcagatatggcagcgcaagacctcccacccgagagccttctcgccctccttcatcggaagacaaagcaagagccaccaggtagctactgctatcagggcgtatggtcccagctcgaccaagcccacctcaccgcctcactcctccagcagcaggggcaccttcactatgtagcgggtagcgccgagaccgtttgcaggccattcttcacgacgcagctcagcgggggcggcgcacctgtaccttggcgcacctacggaggcaacttctatcggggcgggtatagcgatcacttccccatccgcctactccttgagtacgagtaactgagggaaggcgagggggaataagcaaaacggcattgcttcacttgaagcaatgccgttttctatttactgagccgaaagccggactcgaaccggcgacctattcattacgaatgaattgctctaccaactgagctatttcggcgcactatcctgaggggcgtccctcaaatgcgttgcaaaggtagggaattattttagatcttccaaaagttcgtccaagaaacgatccagctcttcacctacaccatccagcagggggggctcgatcttgatgaggtcttcatcaaggaaaaggaggtcttcgatgacggagaagtcggggcggataagctcgatggagaaaggacgtgcgaagcagggacgatcccagaagcccttttgctcgaggcgtgtcaccagctcgcggagcgtctcgatagcgacctctgagggctcgctctctgtgcccgtctctgcccaagcgaagacggagacgtggctgatctccttatcctcgtcatcatagagatgtagcgtgcccgtagcacaatcggctaagagaaagagatcggtgagagggcgactgatgatcggcgactcttcgctgaccaaggagaggaagtgctttctcaggagctgtagctcacgctcgttgctttgcgacataatgcttcgtgttcgattaggagagggtccgcaccgcagaagcccccttgtactaatcacaaaggtaagcaggaatctccattcccccacatgccacgcccgtgtgcgctgtgcttttctctctccagcctctcacaagggcgctatgaagctgcgccctgagcgcactaataccgcctttatcagaagctccataacaagagatagcccacacaaatagagggatcttccccaccctcctacaaggatagaactactgtcctctatagtcctatgggcgaacctatattggtcactgagtgaaccactattggtccacacacgaaccaatagtggtcgaagcgcagaccaatagtggtttttccgcatctacgcacgtagtcataaaggccaggcacgtaaatccaaatatccacgtacgtagatattagagccacgtacgtagcccaaacttatctgccactcgtccacaacttttatccctacgcggaccaacaacctaatagaggtcacttcacaaagctataataggaagcagtccaaagctatattgctttcttcgccatcctatatagagcggaatttccttagctttgcgctatgaataagatcacaacagccctccttgggctactcctcatgatactcggcagctcctgccactccacccaagcggtcagcgaaagcgactacgacctcatcgctatcctcagctttgatccgacagtcgactcaacagcacagccaaagtatcttatcaagaatctcgatggcacacccttcgacacgctggatatgaatgccgagtataacttcttcaatgacggcagcccaaagctcagtggaaagattgtattcttcttctctgatcagggttgctaccacttcttctgcaagaagcccgaggaggggaagcccttacagatcctcatcggtgatgaatggaagacgatcgagcctaccccacagatcaaggtagatagtacccgccacttcttcacaaaagaattagtcttcttcccaattgtagactacgggcaggagctacctatagccttctatcctacccccaaggaagacccagccaagcgcatcaccctgaagcaagacaagctcaacgatgcaaaaatattcttcatacgcgatatccaaggcgagtggatgaagctccagctatgcgtcgacctctcaaccaacgacctctttctggagccagatagcgcatcttacgattgtcaatatgaagactgggaccagctcagcaaggtgagcaaggataatcctacctactggatccgctggcgtgatgggagcaaggtcctgatcccacaggactacctggagtacagagacgtcgaatgctaagcataaagtatatcccttatgtccgcaagtcttccccatcccgtagcagtgagatggggaagacttgctttatggggtatgggaggtatcagtatgaggcaagcgtttttgcttagatttgcgctatgaacaagatcacgacagtcctccttgggctccttatccttttctctacctcctgccgcctcctcaagccaagcaaagacatgggatatgacttcgtcgctacgcttttcaatggcgaaataggagccgacggtatgcgctacttcatcaagaatcttgatgggacgatgtacaatagcaacgtagcccttgtagacggcggccccagcgtagactctgccctcggtgagaaaatatttatctactactgggcaaatgaggcctacggcttcttctgcaagaagccccaaaaggggaagcctctccagatccttgtcggtgacgagtggaaactcctaaaccatacccagtccgtccgtgtcgatagcaccgtcaagttcttccagcgctacatgtatagcccgaagatagagaaggggcaggaatcgcgtctggtcaacgtctacctcgtcccacgagaagacccatcacagcagtttgagatacgacaagatagctctgagatcaagcacttcttcatacgcgagatccgtggtgaatggatgaagctccagctatgtatcgactacagctcctacttcacccactatgtcggcgagatcgggttagagagttgggaagaaatatcccagcgcagctcaacctatccgacctactggatccgatggaggcaggggacgaagctactcacgccactctcggacttctacgacaagtacgcctattggtaggatagctcaaccgctatgaagctcccccttgcggtactaagcaggctacctcgtcgcgctttcgaaaggcactgatagggcggagctacgagtgaaccatgggtttttccttagttttgtagcatgaataagattacgactgccctgcttgggctccttacactcctgtgtgtatcctgccgctctacgaaacaagagcaaagcaatgacagtggctatgacttcatcgcctcactctttcatccctcggaaaccgataccaccagcatattctacgtcctcaaaaatcctgatggcacggtctattgcaatatcggctactcctacgaagagggcttctacgaaaagggcttcagcgactcgctgctctccgaaaagatcttcatctacttccccgataacgggatctatggcttcttctgcaagaagcccgaggaggggaagcctatcgaggtacgagtaggcaatgaatggaagatccttgagcgcacccccagcattcacgttgatagcacgtcgaagtacctgcaggactatatgttctctcccttgggtctacaaaacgagccctttgacatcgacttctatcccagcccgaaggccgacccagcaaagaagatcaccctcatgcaagacagcgtcggcatgaaggacttcttcgtgcgtgagatccaaggcgagtggatgaagatccaagagtgcatcgactacggcccactctatgccgaagatgctatcgtcgatgaagagggctgggagaagatctccaagctcagcgaaaagaatcccatctactggattcgctggagaaagggagacaagatcctcacaccccagacggagttctacttcaagtacggctgcagcatatagctaacacatcaacacaaaagcaaggcttccctatccctcaacgacgaggcggggaagccttccttatttagttcctccctctacgagatgatagtgtggtagagctttttccttagatttgcagtatgaataagattacgactgccctgcttgggctccttacactcctgtgtgtatcctgccgctctacgaagcaagagcaaagcaatgacagtggctatgacttcatcgcctctctctttcatccctcagaaaccgataccaccagcatattctataccctcaaaaatcctgatggcacggtctattgcaatatcggctactccgacgaagagggcttcagcgactctctgctctccgaaaagatcttcttctacttcccagatagcgagatctatgccttcttctgcaagaagcccgaggaaggtaagcctatcgaggtacgagtaggcaatgagtggaagatccttgagcgtgtcccaagtatccgcattgatagcacgtcgaagtacctgcaggattatatgttctctcccttaggtccacaaaacgaatcctttgacatcgacttctatcccagtccgaaggcggatcccgcaaagaagatcaccctcatgcaagacagcttcggcatgaaggacttcttcgtgcgtgagatccaaggcgagtggatgaagatccaagagtgcatcgactacggcccactctacgcagaggatgctatcgtcgatgaagagggctgggagaagatctccaagctcagcgaaaagaatcccatctactggattcgctggagaaagggagacaagatcctcacaccccagacggagttctacttcaagtacggctgctaagcgtagcgccaaaagcagctcacctcacacgagtcataaagcaaggcttccccaccctcgaccacgaggcggggaagccttccttatttagttccttcttctcaacatcatccctatgataatgaggtagagctttttccttagatttgccgtatgaataagatgacaactgccctactcgggctcttcacactcctcggtatctctggctgcggagcaaagcaaagcaacagccaacagactatgaatgaggatgacggctacacattcgtcgctacgctcttctgctccacggatggccccaacagtagccccgcacactactacctcaagaatcctgacggcaccctctacctggatatccataacgaggaaaacgacctttcgcgcgatcccctactcgatggtaagatcttcgtctactattggaatgggctgagctacgccttcttctgcaagagaccagaggcgggcaagcctatcgaagtacgcgtcggagatgaatggaagaccctcgagagtagtgcccatatccagatcgacagcacggggaaatttctccagcaatattatacgtacgtgccgagaggagaggaaggcgaacgtctccctctggacttctaccccagcccgaaggctgacccagcaaagaagatcaccctcatacaagacagcctcgggagaggattcttcatccgcgatgtccagggcgaatggatgaagatacagggtatagactacaatgcactccccgacagcgaagaggtcatcgaagaggaagagtgggcgaaggtctctaaggcctccgaaagcaatcccatctactgggttcgctggagagagggtcgtaagatacttatctacattagtgagttcgtctacaaatacagtgtatagtcaagaaataatcttacctttacactgttcatacatatattaatctctaatcgaacaaggattatgtctaagtgctcaaatggaaacttcttcctcggtgtgctcatcggcgcagccgcaggggcagccgcagcttacttctctgaccgtcgtaagcgcgaagctttctcggataacttctccagcagcgtagagcgcgctcgcgacagcatcgtcgaagggtactacgaagcgaaggaccgctataatcgctaccgcaacaagctcaccgaagagactaacgatctgctcgatgagattgaagacaacgattagtcttcgcacgcgaagtcagtcctaaaaggccgaggcgaatacacgagagcagcgctccccacagggaggtctgtagctccgtgtattcgcctcgctttcttctccctccatatattctaagtatacatagcgcatatgaagtctaagcaaagtggattctcactacctaagtttgtctatcatctcggtcacctcagccgtgagcgtatcgatatcacggccctatcactgggaggatcgatagcccgtggcaccgcgaagatcgtcttctgggggctgattgcttttcttttcttcttcctcttcctcgcgctgaatatcgctctgggctttgcgctcggcacatggagtggcgaatcccctgcgataggcttcctctatctggcagctggctatgtcgggctcatcttgctgacagtgctcctacgccccttgatcaccaaggtcatacgtgatatcgtcgcccgccgcgcactcgcccagacgcagcgtctgaatgtgcgtctcgacctcatccccaccttccgcaagcagcgctacaatagcccctcccgcgctatgcaccagcgtggctcgtacctcgtccttgagcaggctcgctatcagacgctcctactgcaggatgagactttccccgaggtcgcacgtggcttgacttatatccgcgaccacggctctcagctggtcacctcctatgtcagaggcgaggcgatcaactatgctacgaccatccccgtcgtcggcaccatcctcaacaaactcggctataagtccacccgccatcagcgcttcatcggcacaggtggagctgactctacccatgggaagctcggcaagtacagcaagtacatcccctatgtactctccatctgggagatcttcgcccctgccctcatcggtgtggcagcatctcaagctcaaggcttcttcgcacgactcttcgccaagagagccacgaaagtcacgaagaccaagaagcctttctggcgccgatagcccctccttcatccgatccatccacacacgatctattgactctacccaatgaagaagtatactatcgtcggcatcggtgagctgctcttcgatgtcttccctgaccgcaaggcccttggtggcgcaccgaccaactttgcctttcactgccagcagctcgggcacgaagccatctctgtcagcgctatcgggcatgatgccttaggcgaagagatcaaggccgagctccaggcacgccagctacctgccattctacaagagacggactaccccaccggcacggtacaagtcaccctctctgctacgggaagccccacgtatgagatctccgagggcgtcgcgtgggatcatatcgccttcaccgacgagctccgagctttagcacagcgcactgatgccgcctgcttcggttcgctcgctcagcgccacgaggcatctcgcacgacgatcctcagcttcctcaaggcgatgcccgagggaagcctacgtatcttcgacatcaacctccgcctgcagtactatacccgtgagacgatccatacgtcactggagcatgcagatatcctgaagctcaacgacgaggaggtgcccatcgtcgcacgcctcttgggactcgagggcgatatggagaccgtctgccgtcaggtgctcaccgattacagtctgcgcgcagtgatcctaacccgcggagcagacggatgctcgatctatcatgagaagggaagtgtcttccatccatcggcctgcatcgaggtagccgatacggtaggtgctggcgactccttcaccgcaggctttgtctcagcgctattggctgggagaagccatctggaggctgtcgcacttgccacacgtgtcgccgccttcgtctgtagccatcacggcgctatgcccacgctaccgagcgagtaccgcgtagtcgaggcataggtataaaagctgacctggccatctctcccgagatagccaggtcattcgatttatcacttaaacggtttactatttacaagagtcaattgcttctagagccgtatcactctcacgatgcaaaggtagaccaaccccagagaggccacaatacccatttgtaatgattatctgcgcctcatctacctaattaagtggattgtactcggtaggataatgctctacctttgccctacattcatcgggcgagcctccaagcacagcctccacagtatccctcaacgacttgatcaatgaactcatacagacacctccaaggtcacacctacgtcacgcccttcacggctcatacccgcatcagtgacgtcatcttaggcagcgccagcgcactgctcatcatctcgcgcttcggtatccccttgggctttggtgaccaaagtatcggccaggtatgccaagagcatggtgtcgatgtcaagaccttgcttctccttctcaatagctcgatcatcgatggatacgagcccacgcctgagctcatcgcctcggtgcatctggatagcctgctgaagtacttgatcaattcgcactcttacttcctcgacttccgcctaccgctgatccgccagcgcctcctctcggcgatgtcgaactgcccccaagacctaatgtatgtcatacgccgcttcttcgatgagtacgccgaagaggtgcgtaagcacatgaactatgaggaccgagtcgtcttcccctatgcccgcaagctcatggcaggcgagcgcgacagcaactacaacatcggtatcttcatcaagcgtcacgaccagatcgagctcaagatcaccgagcttaagaacctcctgatcaagtactacaccgctccgacgggctacgagatgaccgccgtgctcaacgatatcttcgccgtcgaagtcgacctcgctgggcacaactatatcgaggacacgatcttcactcccttcatcgaatatctggagagccagcaggcctaaggtcacaccgcctactcgcactccccacagcgggcatcactatagaccaaggacccgctctactctaccccacccaagctgatatatcccatggtcacgcctatcaagatagctgtcgcagagccgtcctccatcgtccgatcggggctggaggctcagctgcgcaagctcctccactataaagcccagatcatctacctcctcgatgacaaccgtcgcgagtggcaagacatcgcctcggtcatctctgcggatatcttcatcatcaatcccctcctgacgggtcccaccccacgggcttgcctccctcatctccctgagcacacgaagctcatcgcactgtgctacgggctctatgatgcgggcatcctcaaggagttcgacgctgcgattcacctcgccgactcccctacgcagatctccgacaccattgatcagcttctgcagagcgagccttcagcagcgcccctcgcctcggactcacagaccctcacaccgcgcgaacgcgagatcatcatctgcgtcgtcaagggcatgacgaacaaggagatcgcggggcaactctatctctcgacccacaccgtcatcacccaccgacgcaacatctcgaagaagctccagatccacagccccagtggtctgacgatctatgcgatcatgaacaagctcgtcgagctggaagacatcaagcaagacctctgagcgccacacccctctcgtcaccaggtcaatcctcatagaagagagggagcacaaccctacctcatataagagggaaggcgaaggttttagatatttgtaatagatttagggagctaatccgtagttcattcactacgatattagctcccttcattagtatagatacggtaatatcaaccccaaagagcatacatgatagtcatagagagtaagcgtaagaagctacagactctacagaagaaataccccacagccatctttgccgatgtgacgagcaagtcgaccggtcgtctactccatctcagtcccttctatccgcatggaggtatccccgtcccgatgagtccaggttacacagcgacctgtgtagaatccatatggcaggggctcaaggtctttgagcatgcagatattgatactgacctcttccaaaacgccactatgcgtggtatcaagcggacagctcggaaatacggcaaacccatcggacatcgagcaggcgtacattcccctgaactattaggatatatcgaggcacgcaagcagatctacatccctacctaccgctggatgctggagcactattgcatggatatcatccaccgcctaaggcaggcacatgcagcaggtaagacgatcgtccttcttgactacgacaccaatgccgatgtcgagaatgcgaccaagccattatctcatgcagctctcgtcaaagcctacgctgaggggctgtacccatatgaggatatgcaagctgtagcacagcctcctcttcccaaactcgaagaaccattattcgatgaccttttccctgattattagacattagtaactactatgccgagctacaagaaagacagcgaggagtacaaacagattattcaacgcgagcgtatagaaaaactctaccactttaccgatcgagcgaatctcgatagcatcatcgaagcaggaggactctactcctgggcagactgcgaagcacgccacatcacaatccccaagcctggtagcagcgactcctcgcgctccttggatatgcgagatggtttgcagcactttgttcgcctcagcctatgtcgtgagcatccgatgaaatatgtcgcgatgaaggaggggcgcatcgacaatcccgtcctattagagatctcaccagaggtcatctactggtccgagacttgctatgcagatcgcaatgccacgaagaatggggcgcaggtaggaagtgatatcaccgacttcaagcagatacacttcgatagcgtacgagcacctaaccactttaacctacctgaggaggagcaaaagttctaccaagcagaggtgctggtcaagggcttcatcccactggagtatatcctcaatatccgcaacttcgggatacagctccccaagcagactaagctcacccaccgcagtccctacacggcacaggtcacgagagatacccctaccgccttcatcttcctcgtggaccaatccatatcaatgaatcgaagcaccctgctctatggggagagtctcaccctaagtgaggctgtcgcccgcatagtcaatcgctctatcgaagagctggtgaatagatgtatcaagggcagcgaagtgagacgctacttcgacattgccgtcattggctatggcgacgaagctcagtcagcctggcagggtaagctcgcgggacgcgacttcgtcactcccgaggagctacgacagagcccctacaagaccattactgcgcgagaagagaagcgcacacgacgtggggtcgagatcaaggaagtacagcgtactcagtggctggaggcaaagcatcaaggcaagcagactcgcttagataaggccgtgcgctatgcgcaggggctactggagcagtggtgcgctgatcacagcaggaaggtatgctatcccccgacagtcatcaatatcacagatggtgagtacaatgcggtctctcacgaagagatgctccagatagcaggtgagctaaagagcatcgagacgctggatggcaataccctattcttcaacatacacatcagccccacgaccctccagacgacgagcttccccgaggagcagacaggcatagagccacttgcgcagagactctatgccctgagtagcctactcccagagcgctacaaccaaagtatcagtctcctgatgggtacagatgcctccagtaccaagcgtaagcgaggactcgtagtcaatgccgatatggccacactcatcaagactatcgagatcggcacaccgacgaatatctccaacaacctgtgaagacaatgaaaggacgagcgatcacactccccaagagggagcccaatccactatgcgaagacacctcacgtctgatccctggccgactactcgccgtcgctgatggcgctggaggaggaggcctatatgctgacctatgggctcagtatctcatcgagcatctgcccactgaggcgggatttgctaacgcagaagccttggatggctggcttagtggcatctgggaggagttctataacgcctgtgagcgacaagcacagcagagtgggagcttctatctaaataagttctacgacgaaggctccttctccaccttggctgccctgtggcgggtctctccacggagctactactgggttgcctacggagatagtgtagccttccattacagtcgtcgccggggcacgctcagccatagcttcggagcactaagggatttttcactccctccctacctcatcaactgcaaggatgagcttcgccccgagggcttccgctcgggctactttgcagtcgagcctggtgattgcgtattcgtcacaagtgatgcgctggctcaatacatcgtgatgatgcacctattgacggatcgccagacacaccaggaggagatcacccaattattggctacgggtcttcgacagtccaattatctgcgtcgagccttagagctccccactatacatctgtggcgcgatgtcctgcgccccctactctcctgtgccacgactccacgacacttcgctcggcacatcgatagcttactgcgacaggggctactcgcccccgatgactactctatcgtctggtctaaatgctaacccactatgaactatccctctataagtgattacatcgaggcgctgcgcgatgccgaagacagcctcagcgagctaaaagatctgcgcttggtctatgacgaccaagggcatcccatcatgagcagtggcaacttcgccgtagtcttcaagatgcaggcccctacgggtgagtaccacgccctcaagtgcttcctccgtgaccaggaggagcgaagtgagcgctatcagatgattgcagaggagctccagtacgtccagtcgacctacctcgtgaagttcagatacctcgagagcgagctcttcgtagatgtaccaaatactgaaggcgaggagtaccccgtgctcctcatggactgggtcgatggcattcctttggatcaatacctcaagacgattatcaataagatctacgagaaggatcttttagcctaccgcttctcactactggctcgctggctggtcacacagcccttcgcacacggagacctgaagcccgacaacatctgtgtacgcagggacggatcactcgtcctgcttgactacgatgggatgtacgtcccagctctatccggacgaaagcccttggagcaaggtagccctcactaccgacatcccctacgaagcaccctgcccttcgacgaacatatagatgactatagcctatcgctcatcctgctctcgctacgtgctattgcacttgacgagacactctatgtacgctattcatccagtgagtacctacttctctcagagcaagatcagctaaatccctacacaagccctgtattcaaagagctcaaccacttggtactgagcttagacttcatcgactcctatcacacctatctaaaatctcttcataacacaacctattatcttgaagcgcgcaactttcagctcctcgctcctatcttgatgtatcgtagggcagcagagatgggagacccgaaagggatgtataaactcggagtctgctataacttcgggtggataacgagggatgaagctaaagccgtggaatggtatcaaaaagctgcggaggcgggagatgcagacgcgatgtgcgccctcggccgctgctatcgcgacggcgaaggaggactaacgaaggatgaaagcaaagccgtggaatggtatcaaaaagctgctgaggcgggaaatgcaacagcgatgcgcagcctcggatacctctatgactacggcctagcggggctaacctgggataaagtgaaagccgtggaatggtatcaaaaagctgcagaggcgggagatgcagaagcgatgtacaacctcggtgccagctatgaatacggcatgggagggctaacgaaggatacgtccaaagccgtggaatggtaccgaaaagcggctgaaggaggaaggaacgcggctgcaataaggcttcaaaaactgggagaaaatcacccttaatttgctccatccaagggtgtactacgaagcaagatactatctccatctccgagtatagctccatgcatatacgactccccaatagcggatccttcgataaggacgctattggggagcgttcgtttacaggtacttcgccataccacttggcgcatcatttctcttgaagaaaagctccaactcacctcgaagaaacccgcatttcagctcagggaaagcagtgaagccgtagtgaaaaaccttcgtctacgtacgtagtcataaagaccacgcaggaggatcataagatctacgcacgtagatttaaagaccaggcacgtagaccaaagaatagccgtagagcttcggggaaacattcccttgagaatgaaagaataggagctactcggacgacttttctttggcgcattgctgagtacaaatagggcgaaaacttgatgcatcgctatggtgcggcagtggtatcataaggcagtagaaggaagctccttcgcacggaggctcaaggagggggcatagcagacggcgctcctcccgtagcatagcgctgatccagcgggaattccgtatatttgtatactacaaaaattacattcgcacagcatgaaatttactgtcaccagcaacgacctactcctgcagctccaggctgtagccaaggtcatcaatcagaaaagtgtagcagcagtccccgtactcgaaaacatcctcttcgagcttcagggcaacatacttaccctcaccgccgcagaccagagcaaccgcctgacctgcgctctcgaagtcaacaacctcggggaagatggctccttcgccgtacgaagcaacatcatcctcgacgctatcaaggagctctccgaccagcctatcgagatcgacgtcgatagcgaaggcgggaaggctaccatcacctatagcaacgggcactacagcttcctctctacctctgcggacatctatcctcagggtatcgagcttgacgaagctcgcaccatcgtcatgcccgctcagagcctactgaagggcctcgagcgcaccctctacgctgccagcgatgacgacacgcgccccatcatgacgggggtctatctcgacttcttccctgagaagctcatcacggtagcctccgacggccgtatcctcgtgcgctacaccgactccaacatcaagtgcggtgagacggcatccttctgcctccccgctcgtatcgcacagctcctgacccgcgggatcctcgcgaaggaagcaggcgaggtgaccatcagcttcgacgggcgcaatgccagcttctctatgcccagcggctcgctcacggcacgtctcctcgaagggaagttccccaactacaactccgtcatccccaccagctcggtacacaatatcatcgtcgacaaggatcagctcttcttcgcttcgaagcgcgtctcgctcttctcgaaccgtgccagcagcctcgtgatcctcgacttcgccgatgactcgatccgcatcactggtcaggaccttgacctctcgatcgcagctgaggagacgatctcctgctctggtcagcaggctggtacgcgcctgcgcatcggctttgacttcagctacctgcagcgcctcctgcagaacgtagcgagcgagcagatccagttcagcctcaacgaccagacgcgtgccggtgtcatcaccccgctcaccagcgacgaaggtatcgacatcaccgccctaatcatccccatgaagctcttaggcgaatagtagccgaggagcactacacctattgcatacatgaagcttaatctacagcgcccgatcgtcttctttgacctggagacgacgggcgtacagatcactcgtgaccgcatcgtcgagatctcgatcctgaagatcagccccgacggcgagcgcgagaccaagacccgacgcatcaatcccgagatgcccatccccgcagaggcatctgccgtgcatggcatcacggatgccgatgtcgctgactgccccaccttcgcacaggtagcacgcagcctctacgcttggctggagggctgtgatatcgcgggcttcaactccaaccgctttgacgtaccgatgctcgtcgaggaattcctccgtgcgggcgtcgctgtggacttcgatgaccgccacttcgtcgacgtgcagacgatcttccacaagatggagcgtcgcacgctcgaggctgcctacaagttctactgcgacaagacgctggagaatgcccactcggctgaggcggacacgctggccaccttcgaagtcctcgaagcccagctcgaccgctatcccgatgacctcaaaaacgatatccccgcgctggcagaattctctacccacgggcgtcgtgtggacttcgctgggagcctggcgtacaacgacaaggacgagatcgtcatcaacttcggtaagtacaagggtgtccccgtcacggaggtcttccgcaaggactctgggtactacaactgggttatgggcgcacagttcccgctcgagacgaagcgctggttctcccgcctctaccaagagacacgtaagctataatgggcatcctcagcggtaagcacatcgtcctcggtatctcggggagtatcgcggcatacaaggccgccgtcttgacgcgtcttctcgtgcgcaagggggcggaggtacagatcgtcatcacccctgcggggaaggagttcatcacgcccatcacgctctcggcactgagctcacgccccgtcatcagcgagttcttcagcggacgtgacggcacgtggaatagccacgtcgacatcggtctgtgggcagatgctatggtcatcgcacccgctaccgccgccaccatcgggaagatggcgcacggcgtagcggacaacatgctcctgacgacctacctctcgatgaaggcacccgtcttcgttgccccagcaatggacctggatatgttcgcccacccctcgacgacggacaaccttgacctactgagccagcgtggcaacttcatcatcgagcctcagtcaggcgagcttgccagccacttgatcggtaaggggcgcatggaagagcccgaaggtatcgtcgctgcgcttgaagacttcttctcctctactctcgactatgaggggcgtcgcgtagtcatcacggctgggccgacgcacgagcctatcgatcccgtgcgcttcatcggcaatcactctacgggccgtatgggcatcgccctggcggaggagttcgcacgccgtggagcagaggtggacctcatcctcggcccttcgtcactcaagccctccgaagctgtccgcactacccatgtgacgacagccgaagagatgctacaggctacggaggaggtcatcgaggaggctgacatcgccatcttctcggctgccgtcgccgactaccgcccacgctatcactataccgagaagatcaagcgtgagggacaggcggagatggagcttgagctcgtccgcaatcccgacatcgccgctacactcggcgcccgcaagcgccccgagcagttcttcgtcggcttcgccctcgagagcaatgccggtgtcgaggaggccaagcgtaagatgcacgccaagcacttcgatgctatcgtgctgaacagcctgcaagatgctggtgctggcttcgcccatgagacgaataaggtcacgatcttcgaccgtgagggctccatcgaagcctatgagctgaagagcaaggatgctgtagcgcacgacatcgcgagcttcatcatcaagcgcctcggcgaatagttctcccttccttcatctgcccatcaagtcaagcctgatgcgtctactccacctcgtcctactcgtcctcacgctggggcttctgccactacgagcgcaggagctgcgggcgacggtagagctacggacagaggcgctggggagtgaggggcagatacactacgagggtctgcgtcgccagctcaccgacctcctcggtcgcacacgctggacggaccttgcctacaaggagggcgagcgtatcgaagtctccttcatcttcaccctgcacgagcgcagcgaagctggtgaatacaagggcgagctggtcatctccgcccgtcgccccatctacggcacggactatatgagcccgacactcctcctgcgcgatccaagcatcaccttcacctacctaccaggcgacccactcacctatcaggagatggagcccgagcacccgctggtggcgctctgctccttctatgcgctgtacgtcatcgcgagcgacctcgatagcttctctcccctcggaggcagtcgcctccagcctcgtctgagcgccctcgtggcctcagctatgagtcaccccgactggaagggctggagcagtaccgagcgtggtctgtcacgtgcacgacgcttggagtacctgacctcgcaggaagatgagcgctaccgccagtgctggtaccgctaccaccgcgagggcttagaccgcctctcctccagccctgaggaggcccgtgaggtccttctcgaggtcaccaaggagcttgtggagctccgcaagatccgctcccgctcggtcgcactctccgacctcgagcagaccaagctccccgagcttatccagctcttccgctccgccccccagagcgagcgccttcttctctctgagcgccttcgccagctcttccccactgcgggagaccagctacaggccctccgctaatccccgcttctctcagttatgcttcagagtctcagcattcggaacttcgtgctcatcgatgagctcaccatccagttcaccccgcacttctccgtcatcacgggggagacgggtgctggtaagagtatcctcctcggtgcgatcgccctcctgatggggcagcgtgccgatagctccacgatccgtcctggggctgagcgctgcgtcatcgaagcccgcttcacccaccttgacgcagccgtaggggccatgctcgaagaggaagacatcgatagtgacgaggaagagtgcatcgtgcgccgtgagatcacggccaagggcaagagccgcgccttcgtcaacgacacccccgcctcgctccagcttctgaagcgtctgagcgaatacctcatagacatccattcgcagcacaagaacctcctcctcggcgacgcaggcttccagctctccgtcctcgatctgtacagcggagagctacccttactcagcgaatatcaggcagccttccgctccttccgcagtgagcagcgtgcctacgaagaggcatgtcaggaggccgaagagctgagacgcgagcaggactacctacagttccaatacgaccagctggaggaagcagaagtggagtcgggcgaactcgaatcgctcgaagaggaagagcgtcaactctcccatgcccaagagatccgtgaggagctcagtagcgccgcctctgccctcgaggatgacgagcacggcgccctacccgccctctatcatgccctacgctccgtcgagagcatccgccgctaccacacgcccgccgcggagtggtgcgagcgtctggagagcgcacgtatcgagctccaggacctggcgagctcgatgagcgacgaggcggaggaagtgaccttcagtccgaagcgtctggctaaggtcgaggctcgcctggacctcatccgtgggctcctgcacaagcacagcctcgcgagctgcgacgaactgatcgccctgcgtgatgacctctccagccgtcttgagcaaatcaactcctccgacgagcacctcaccgccttctccgaagccctcaagaagcgcgaagccgaggttctccgccttgggaaagccctcagcaagacccgcaccaaggccgctcgcactatcgaaggcgccctcatcaccacgctccacgagctgggcatgcctcatgtacgcttcgtcatccgtcaggatatcttagatgctcccacccttcacgggctggatcacgtcaccttcctcttctccgcaaataaggagatcgagcccgagcccgtagcagagatcgcttcgggtggggaaatctcccgcctcatgctcgctatcaaggcactcatcgctgaccgccgtagcctccccacgatcatcttcgatgagatcgatacgggcgtctcgggcgagactgccgaacgcatcgccacgatccttcgccgcatgggcgagagcatgcaggtcctcgcggtgacgcaccttcctcagatagccgcagcgggcgaagaccacttctacatctacaaggagcacggcgaggcaagcacccgcagctacatccgtcacctcactgcagaggagcgcatcgacgagatcgcccgtatgcagagcggcagcaagctcaccgatgtcacccgtgccgcagctaaggcactcttagagactgcgcagagctaagctccctccccgataccctccccttcacttcatacgcctcccgctgcaagactctcgcaggtctgcagcgagaggcgtatctctataccgcatacagaagtgaagtaaggtagggatatcgacctatattgaggctgtgaccgagagtcctgtcccctacttagtgtgctaaggtatctcacgcccagctacccgatatgccttctccgaagtgaccgagcaagcccttctccttatcgcgagtattcctcttatcctgtggaggaaaaagtgtccttctcgtgaagaaaaaagcgccttcatgtagtggttttcttctatctatgtacgtagtcttaaagaccaggcacgtcaatccaaatatccacgtacgtagatattagagccacgtacatagcccaaacttatctgccactcgtccgcaacttttatccctacaccgagcaacaaactaatagaggtcagcgggcgaacctatataggttggcatgacgacctatattggtcacgacgatgacctacataagttcgcccgctgaccaatataggttcatacgcccccacctatgacatgcgaaggagcagactatagctgggagccattaccctccatagaaggctatacctaccatgcccatagccctctatctgactccagtagagaaagggctgcaacgcaagtaagtccgacaatttgtgtaccttggcacagtctttgtacatcgtacatcaagaagtaagtattcactaacctccgtcgtcttgtcgggatacactcccttgagacggcctaaaacagtaagcaaacaatgaaattccctaagtgggctatcgcagtagctgtcatcgtcctccttgccatctgggggatctctaagtacaacggcctcgtcactattgaccagaatgtcaagaacaagtggagccaggtagagaaccagtaccagcgtcgtagcgacctcatccccaatctggtgaatgtcgtcaagggctatacttctcacgaacgtgagaccctcgaaggcgtcatcaatgcccgcagcaaggctacctcgacgacgatcaatgccaacgatatggacgaagctgcactgaagcgcttccagcagaatcaggatgctctctcctctgccctctctcgtctgatggtcgtcgtagagaagtaccccgatctgaaggctaacgagcagttccgtgacctctcctcacagctcgaagggacggaaaaccgtatcgctacggctcgccgcgacttcaatgacgctgctcaggagtacaacacgcaccgcaacaagttccccacggtcatcgtcgctgggctcgcaggcttccctgagcgcccctacttcacggctcaggctggtagcgaagtagcacccaccgtcgacttctctacggagaagtaattccccactaaacgactatgcgctacaggatggatagagcgctccgacatctcctcctgctcgctctcattagcctcttcccactcggtctttgggccgaggggaaggtctatacgcccgagctcgtaccgaatgtcttcacgaccgacagcacccgtctgctctccgaccccgagggctacatcactgctgaggggcgagagcgcatcgatgcagcactctacgagatccgtcgcacgacgggtgtagagttcgccacggtcatacttccgagtatcggggagcgagatatcgagagcttctccacggacctctttaggctatggggcttgggctcgaagacccgcaatgacgggctcctactgctggtcgtcatggaccagcgtaaggtccgcttcgagacgggctatgggatggaggggatattgaccgacgtccgtgccagccgtatccagcgacagtacatcatcccgctgatgcgcgaaggggactacgacggagctatatataatggtgtagtagccgtaggtaaggtactccaaggagaggagtacacctccgaccgcaggacggcacgtggcgaaggggagtccttcaccttcatgctgtggctcctctatggcgtcttggtattctctgctggatatagtgccttctccagcctctatgaggagaagctccgtagctgcacaccgcgcttagctagagagcgccttcctctgatcgaagcccgagctaagacccaccccatcctactctacatcatctgtctgcccgtagggctactctatcacttctatgcacgtcgggtactgaacgaaatacgacacctcgccagctcctgcccgcagtgtagacaggataagatggcaccccttgcttcggctgagggctggcgctatctgacgcctgccgagcagaaggagatggagatcggctcacgcctctactcggtctatcagtgtagccactgtcactatgcggagaccgctgggcgtgacatcagtgacgcatggacacgctgcgagcactgtggagcccgtacggtagccctcgagcgaacagagcttatcgatggagggcgctatgagcgccgacactaccgctgtcgcaactgtgggcacgattcgcatagcgaccaccgccgtcagtcggataatgacgagctcctgagaggcatgctcctcggcgctctactcaactcaggtcgcaatcgaggcggctggggtggcggaggcttcggcggcggatttggcggaggcagcttcggtggaggctcctcaggtggtggtggtgccaccggtggctggtagcctcagctccataccccttagatacgaattagcccctacgactcgcagtgagtcgtaggggctaattcgtttagtcagtgcggagagccctaaggattctgctgacagagaggattgaccttaatctctgagtaagggatcttgaactgccagttcttatcgtcgggcgtcttaggcattgtctcgaaggatgcattttggttcttcgcgatagcctcctggtacttcgtctcaccaccaccaggaccagcgaagtccttaatgatctggaagttcttcgctgcaaggcgattgggcacgatacccaggcgcttcatatcgaagaagcgtaccccctcgaagaggagatccaggcgcttgtgcaggaagatcttctcgatcagggcatcccccgtctccgtgggctgtacgaagtcagcatcgcgcgtcttcactaccgtgtagagcgtcgtctgagcagcggcatccttcccctggcgagcttcagcctcagcctggatgtagtacatctcgccaaggcgcatgatgaggacatcccccttactggaagcgtggttctgcacgcggtacttcatacactgtcccgtgatctcgaagcctggtgtcccactgatcagagggaggtagccggcatcgacatcctcggggatattctgatccaggtcatagcagtaccaccacttgcggcgcacgtcattcgtccccagctggtcgaagatatttcgattcacagcgaagcggaaatggtcctgccagccgttatcgaagttcgtcgagtacgtggcgaggaaagtaccgtagccttggttctgtgtctcagcatagcggtagccccacatccactcgttggcggtgtagtcgttgaagccatcgaggagctcttcacccacctggagcttagagttagcgtttgcgatagcctccttagcataggtctctgctgcagcccagtcggacttacagagagccacgcgagcggctataccacagaccgtcgagtagcgcaggtggttgcgcgaattattttgatccagatccttgagcgtctccatagccatcttcaggtccgactcgatgagctcataggcttcggcgaccgtaccacggcgagccttttcgtagagctgagcgttagtcgcttcatcagtacgcatgacgacccctggatcactggctgccgtcgaggcattgtagcgcttagcatagagctggacgagctgatgataagcataggcgcggaaggcgtaggcttccccagcggagtagcggatcttcttatccttacgctcctcttcggtcagggttttcttgaagcctcggatagcgatattcgtgtgctggatgagggtatagtagaagtcccaagccagatagttgatgactccatccccacgctcattgtgcgcccccagataggtgtactcattgaggaaagctggctgcgtattgatgacatcatcgctcatcaggtcaaggcgcaggttgagcgaagatgctccagcaccgaaggactgaccaaagccataggtgtacatcatactatgcagcccattgacgatccccaagagcccttcttgggtcccttcagcttgcttgtcccccagtgaggaggtaggggaagtttcgaggaagtccttcttacaagctgggagcgtgagcaaggtcacgcctgcagctatggcaaggtatttatgcaatctcttcatgatcgtaggcaaagattagaaggtgacattgagagtcgtagtgaaggtgcgggcggcagcatagccgacagtaccatggacaccagtgtagccgctgaaggggttgagccctctgcgcttggagaggataaagaggttctcagctgcgaaggtgaggccaacaccatcgaccccgagcttcttagcaaagtgcttggggaggtcgtaggtcatcgagatgctcttcagtgcaagggcagtcgaagagatgagccagcggtcagaggtcatcgtcgagaagttctgtgggtcagcatcgaggcgagggacgtcagtgacctgcccaggcttgcgccaagcacgatagagatcagggtgcatagctgtccccgaagtgaggtcacgtgacatcatgctctgatagaggccatcgtaagacttaccaccgatctgataggcaaagacgaagttgaggccgatatccttgtagcggaagttcgtggagaagccaccatagacatcagggatagatgagcccgcatagtgcttgcgagccttttccccattcttcgtgtaggtagcgcgctcgcccgtagcttcgaggccgggttcatcggggttcttctcccggtcgaggcgatacatagccttaccatcagcagggtctaccccgaggtattcgtagacgaagtaatcgtagaggctgtgaccctccatatacttcttcgtcccgacgatgatcccttcttcacgattgagatcagggagcttgacgatcttattccgcagccacgtagcgttagcacgcaggctccaagagaagtcgccgatacgcaggatcttagcaccgagctcgagctcgagaccatagttgcggatcttaccgatattacggtcgatgctgccgacccccgtcgaggtagcgagctcatactcgaagagcaggtccttcgactccttgttgaagacttcgatcgtaccatcaattcggtcaaagaggccgaattcaagagctacgtcagaggtaatctgggtttcccacgtcaggtcggtattcccgacatgtgctacacgcagaccaggttcatcgaggttattgctggagctgtaggtcgtctgatagggatagtagccagatagaccgtcattccccgtctgcccataggagccacggagcttgagtcggttgacccaagagacgttcttcatgaacttctcggagttgatattccacccagcaccgacagcccagaagttcccccaacggctgttcttgtgaaagcggctagaggcatctcggcggtaggccagcgagaggttgtagcggtcgctgtagttgtagttgaagcgaccgaagtaactttccttgcgatagacatcggtgctggagttgaccgagcgtactttggtatagttggagagctcatcgatgacgatgaacttcaagaactccttcgatcccgacataccgaagttctcgagatcatagctctcatgggcgatgagcccttcgaactcatgatccttacccagcttcttcgtgtagttagcgagctgtgtgaaggtcagtgtcgtaccacgacctacactcatttccagcaagccctgaggattatcccccgtcttgttgttgtagcggagcttagagcggctattcgtttggtcgtaggctacctgaagcgagagcttaagcccatcaataggcttaatatcgagatgtgcacgacccatcaaggcatcgcgcagcgactcattgtggtcgaggtaagccagctcgatcgtattgtagttcttacgataggggcgggtgacgctgtggtcatagatcctattcccgcggtcatcgaggacgtatgctcccgtcagcgggtcatggacatggataggatagataggagcgaccgtctgagaaaagtgtgcaccattagcagaagtaccaccgagcgagcgaggaccttcggagcgtgtgtgcgtcagcccaatgttcgtaccgagcgtcagccaggggcggatatcatacgagaggttagcacggaggttgtagcgcttgtagcctgactcgatcatgaatccacgctcgttgaggtagttcagcgagaggtacgactggagcttatcggtacggagacctccgctgagcgtgtactcaccacgatggcccgtgcggtagaaggcattgtaccagtcgaggtcatcgccatagaggaggccattgatctcggggttcagctcaccggtaggaaggaggataccaggataagcccccttagcagggccacccttagagagctgatagaccccattggcgtccttacgatagtaggagtcgataccactatagggattgtacttgagcgcttgataagtctggagggctgcgatcgtaccgagctcttcatcagtcttattcttattgcgctcgtcatagcggagcgtattgtaccactgctgccagcgcaccttgtagtgatccatggtaccgatcttatcgtactcagggagcccacggacggagaagccttggctcgtagagaaggtaaagtgaggctgaccagcctgcccagcattccgcttcgtggtgatgaggatgaccccattacctgcgctggagccgtagagggcggtggcggcagcgtccttcagcacagagatatcagcgatatcctgctgagcgatatcagagatacgccccgtatagacagcgccatcgacgacgtacagaggagccgaggaggcattgaccgatccgaagccacggatacggatatctgcttcggagccaggctgacccgatgaggtcgtgacctgtacccctgcagcagcaccggcaagtgcgttcgaggcattagagataggtcgggctgcaagctgcttgccactgatcgaggcttgtgccccgacgaggctctgcttcttctgcgtaccataggctacgatgacgaccttgtcgatggactgctcatcgttgtccaggaggatgcgaagttctttgcccgtgatggcgacgaccttactggcgtagccgacgctcgacacacgtagcgtgcgagctccctcggggaggtgaagggtgaagcgtcccttcgggtcggtcagcgtaccgatgttgggatagtctacagactggactgaggccgggacgatgggctctttgtcctccacagagaggacgatccccttgacggtgatctgcttcttttgagcccatgctactcctatcgaaagagttaggaataggagtaagagtaaactcttcttcatttgcgtctttgggtaactaaggtgaaacggataggatctgacgacgggtagagtggacctcatccgacccctgctggagggtgatgagatacacatcaaggtgtgtgctaaaggctctcccctactcgtgtaggttggtgttcgcagcgggaagggagggtctgagggaggatggtacggctgtgcaggtctactcggagtgcctactctcttgaatgaagaggtactcagggcatgtgtctaagactatcgctcagccatagggaggaggtacgtcggtgagggtaatgcgttggttggagaggatcgctgaggtgtgtcggtgtgtctctccttgtctttctttgcagtaaaggtaggaaacttcttattaaataccaatctctccatatcatacgatacaaaaagccccgccgcagggatctgcgacggggcttctatctatatatctgctgggaggactgtgaggcttaagccttcgtgtcttcgctcatcagcttgttgaagtcttcgggagatacttccttctccgtgacggtgatcgcttccttagcgatagcagcgagcttggagtcagcgacgcggtcgatgaggttctccttcgtgcgcccgtccttgagcatgctctgagcgtagttctcgagcagttcgtcgggcacagaagtcatgccgtacatagcgaactggttcttagctacgatgagggcgaacttattgaggtcctcatcagagatctgcacaccagcagcttcgaggagctgacccttgatgcggtcgaaggtgatgtcatcgaggatctgtggcatatcacgatcgagatcttcgaccttagcctcagcgttgcgagcgaggaagatgcgcttgagcagagcttcgtcgtaagctaccttgccagccttcttcagaaggagagcacgcaggtcacgcgtgaacttgaagtcgctctcggtggcgaactgctcagcgaagctctcctggatgttcttacgcagagcttcttcgctgcggatgtcgctaccttcgccgaaggcttcggtgaagaaggcatcattgagctcagcagcttcgcggcgtgagatcttcgtgatctggtaggagaaggctacaccatcgagggcggggacagcttccttctcgatctggaggagtgaagcgatctcaggagcctgaccgtcatagagagcgaagggctcgaaggtgatcgtatcaccgagcttagcaccgatgagcttagccttctcagcttcactcttagcgaagcgggggaggatcagtgcctgggcagtttcgataccgccttccttgggctgaccatcagcgagctcgagggcacggccgtagacgacgtcgttgtcctctacagtgtcagcttcaatctgcttaccagcgttctcaagcatacgcttgatctgctcgtcttccatttccttggtagcgacgatgcggtagtaggtgagcttgtccttcttctcgagcttagcttcgatcttaggagcgagggctacgtcgtaggagaattcgaagttctcttccgtagcgaagtcgtactcctcagcgtcctctacaggcaggggattgccgaggatctggagcttctcttcgtcgatatagccgaagagagcgctgacgacagcacggttgatctcctcgaccttgaccgaggtgcctacctgcttcttgatgaggccgaggggtgcgtggcccttacggaagccagggatagaagcattcttctgatagttcttcagtgccttatctacttggggttggtagtctgctgcactcacctggacggtgatgacagctgctacatcggaggtctgcttaatcgatacagccattcgtcttttattatttaatgtatactatgcttattcgtaatatctgtcgggtcgggcaaggaggtgagatctctgcccacagcaccctaacaaattgagtgcaaaggtaatctaaatagactacttagacaagctaccgcaagcctgcaccacgggcgatccgctcacgaaggatctcggtagacttcgggtcgtcgaggatctcaccgagcagggagaggaacttcgtcacacgcgtctcaggggtcagcatctcctctaccggcagaggagccgacgaaggagcatctcccgagggtaggacgagcgccgtcaagagcacctgtgtcacgaagaacgtgaagggctgcatctcgggggggaggaagtcagcacgctcacggagggggaacatcgggcggtacgtgtggatgaacttgtagaagggcccgatgatgaagggattgatgtgctgcaggatcgaggagagctgcacgggagtgaagtgctggagcgtctcgacatgcatatagagatgcttgatctcgaggcgcttgatggcgagcgagacggggttcttccactccttcaagcagtcggcatcattgacgtagacgaaggttgccttcgccccctgctgtatgggctgcttgaggaaagtctgctgcgagaccacctgcacaggcagatggatatactcgctgtactgcaggaggatggactgccagagcaggacatcggtctcattccctacgatgatatagcccttgttacgctcgacctctccctgatagacctcctcgacgaggcgagccaagaggtgcatgtagaagggatgcttgaggccgacgatgaagccaaagccattcaagcagaggtcatagagcaggtgctcaacctcggagtaagcgggattgatctgcttcttatcccaggggatagccttctcgggataggcggagctgagctcggtcttccactgactgagttgggcacactcctcggcgaactcctgcacatcctcatagcaacggaaggaggatgagatcgccagtgcctcctcacaaatctgctcaaggaggtgatagttgctctcggggaggattccttcgggagagaagtacttctccttcagacgctcgtactcggcacggtacgcatcgcctacacggaggcggatgctacgcccgcccttgtagctgacatagatagaggagtattcggcagcatagctcaggccagcccaggggtagcctgggacgtgctcctcgaggaagagcgataccgcctcgaggtgcttacacgtaccgaggccattggtacggaagtccagacaggagcagaagttgcgatcgctctgtacgccacggaaggcgacacggtagcggccggtggtgctacagacgaggtagtcaccccagatgcggttcttgtcgaggtgctccacggtgaagtcactctcgcgtgcgttctcacggcggagggctacctgccactcctcgatcgtcatgttgtcgggacagatcttgttggataaacggtttccaagtttcatgggtgtggtggttatagtgttaggggtaaggatttattcaatacaacatactatttgtgtgaagccttcttacggccagcaagcttgagttcgtcggcgaggaaaggtgccgtagggctgtccttgacctttgccaaagcctcgggagtaccagcgaagagcagctgtcctccgtccttcccgccctcgggaccaatctcgatgatatagtcggcactcttgaggacatcaaggttatgctcgatgatgatgacggtattcccacgatcgacgaggcgattgaggatgccgaggaggacgcggatatcctcgaagtgcaggcccgtagtcggctcatcgaggatatagacggtcttacccgtgtcgcgcttagcgagctcggaggccagcttgatacgctgactctctccgccagagagggtcgtcgaggactgcccgagcttgatatagccgaggcctacatcctgcaggacctgaagcttcttgaggatatgggggacgtgagcgaagaactccaccgccgcattgatcgtcatatcgaggacgtcggcgatggacttgcccttgaagcgcacctcgagggtctctctattgtagcgacgcccgtgacaagcctcgcatggagcgaagacgtcagggaggaagttcatctcgatggtcttgtagccattccccgagcaggtctcacagcgtccgcccgagacgttgaaggagaagcgcccaggcttgtagccgcgcatcttgctctcgggaagccccacgaagaggttacggatatcggtgaagacacccgtataagtcgcggggttactacggggcgtacggccgataggcgactggtctacggcgacgaccttgtcgacgtactccagcccctcaatgctatcatagggcagcggatccttcagcgaagaatagaggtgctgactgaggataggcagcagggtctcattgatgagcgtgctcttaccactccccgataccccagcgacacatatcatggtacccagtgggaggctgacatcgataccacgaaggttattgccacgcgcacctgtcaggcggagctgacgctcggtcatcgggcgacgctcgggggcaacctcgatggtctcgacaccgctgatatagcgtgccgtcagcgtgccagcgcgcatcatcgcctcgggcgagcccgagaagacgacctcgccaccgaggcggcctgccttcggccccatatcgatgatatggtctgcctcgagcatcatatccttgtcatgctcgacgacgatgacggtattccccagatcacggagcttctgcagcgaatggatgaggcgcacattgtctcgctggtggagaccaatactcggctcatcgaggatatagagtacctcgaccagctgggtacctatttgtgtcgccagacggatacgctggctctcgccccctgagagggaggcggtcatgcggttcatagagaggtagccgagacccacatccaggaggaaggacagacgggtacggatctccttgagtacctcggtagcgatggtacgctgctgatccgtcaacttatcctccagcccctcaagccaagaggccaggtgcgtcagctccatcgaagcgacctcaccgatattcttcccgccgatgaagtagtgcagggcttccttgttcaggcgtccaccatggcactcggggcagacctctgcgcgggtgaactgtgccatccacttctctgcgcctcggggactctcctcctcttcgctctgcgccataaggtaggcaccgaggccatcataagagaggggtacgccacgcagctctgtgaagcggtcgtccagcaggactaagtcctcttcactgccctcgacgatctctgtgagtaggtcatcgggcagctgggagataggatccttgatcgagacctcatacttagcgcagagggcttcgatctgggcgaagaccagcgtacggcggtacttccctaaggggagaatgcccccagcatagatgctcttcgtgcggtcgggcacgatgctatcgagatcaatgacacgtacttcgccgaggcccttacagcgcggacagctaccgttgggcgagttgaaggagaagttgtgcggtgcgggctcgttgtatgacaggcccgtctcggggtccatcagatggcggctgaagtaagcgacctcgcccgtgccgatctcttggagcatcatcaccccgtcgccctccttgagggtcaggcggaggctggcaagtaggcggtcgcggttcttctccgctatagtgagtttgtcggtctgtacctcgacgctgtggagcttgtagcggtcgagcttcatgccgtaggtgatctctcgtagctccccgtcgacgcggacggtgaggaagctcttcttacgaagctgctcgaagagctctttgtaatgccccttacgctgcttgacgacgggggccaagaggaggaccttcttcccctcatagcgctccaggaggagctccaggatctgctcctcggtatagcgcaccatgggcttgcccgagaggtacgatacggccgtacctgcacgtgcatagaggagacggaagaagtcgtagatctccgtgacggtcccgacggtagagcggggattgcggttcgtagtcttctgctcgatagatatgacggggccgagacctgtgatctcatcgacgtcagggcgctcgagacctccaccaaggaagcctcgggcataggagctgaacgtctcgatatagcggcgctggccctcagcgtagatggtgtcgaatgccaaggaggacttcccgctaccactcaggccggtgaagactgtcagcgagtagcgagggatgtgagcatccacgtccttaaggttgtgcacgcgggcaccacgaatatctaagtcttgcatctaataaatgaaaggaagacccgagcagagcctaccgtgaaagaatgtatagtacacaaagttacgaataaatcggctctctgtctcgcccttgacagcccccttatcccccctaagccaagagatttctctatgagtctatcgtacccctcgcataagggggtgctaccgacctatattggtcggcgggcgaacctatataggtcatcacacggaccagtattggtcacgacgtcgatctatataggtcggagcagtgactcatattaggttgttgctacgcatagggataaaagttgtggacgagtggctgataagcttgatctacgtacgtggctctaatatctacgtacgtggatatttggactgacgtgcctggtctttaagactacgtacgtagatagagaaaaaccactacaggcaaacgctttatccttcacgagaagggcactttttcctccgctgaataagaggaatacgcgcgataaagcgaagggcttgtgtatctcttcggagaggtatatcggggagctgggcgtgcgatgccttagcactctaaatagaggacaggactcgctgcaacaggctcatataggtcagcagaccttgccgaagaggctctaacgacaaggcgctcgataggataagcatctatataataataatgtactatcttcgcagggtgagccttggcaccaacatacgcacttgccctcaggcttccctcatacagctcaactgaatccacaatttataatgcctatggagcgaatcctactcactatcctttacgccttcctcgcttggctgctctattacgcagagtccgctggtgacacctggaaggatcgtcttcccagtctcttcctcttcatactcctcgtcggagctatccccgaaggggtgcgcctcacgcgtcgcttcctccatcgcttgcgcagagactggcacagccatcgtagcatgcagcactaagctgtagctcggagacagcgacaccctaagagcagtgagccccacaatgcaaccgcattgtggggctcatacctatatattatggagagattcgctgtacctttgcggggcaaaagaagcccttagctcccgaagcaagagctcggcatatcggccttcccctacatttatatatacccctctcgttatgagtgcaagtgataccctcgacctaccctacctcagtgagctcaacgaagcccagcgtgctgccgtcgtctacaacgatggccccgcactggtcatcgctggcgcaggcagcggcaagacccgcgtcctcgtctacaagctcctctacctcttagactcgggctatcaccccgcaggtctcatggcactgaccttcaccaacaaggctgcccgtgagatgcaggcgcgtatctcccgccacgtcggctcggtagctcggcagatccacatgggcaccttccactcgatcttcgggaagatcctccgccagcatgcccccctactcggctacacctcggactactcgatctacaacacctccgacagccgtagccgtatcaaggccatcatcaagcagctcggtctcgacgacaaggtctacaagcccaatgtcgtgcacaaccgcatctcctcggcgaagaaccgcctcatcaccgccagtgcctacgcctcctacactgacttcctcaagtacgatgcgaagagtggcctgccgaagctctacgagatctaccagcactacgaggctgagctcaagcgctccaatgcgatggacttcgatgacctcctgctacagatcaatatcctcttccgccagcaccccgatgtactgaagctctggcaggaccgtatcgattacctcctcatcgacgagtatcaggataccaacttcgcccagtatatgatcgcacgccagctgatgcaggacaagggtgctatcttcgtcgtcggcgatgatgcccagagtatctactccttccgcggggcgaacttggacaatatccttagcttcgagaagaccttccccaacgcccgcaccttcaagctcgagcgcaactaccgctccacgcagaccatcgtcaaggctgcagggcagatcatcgcgaacaacgagtaccagatccccaaggatgtcttctcagaggagtctatcggtgagcctatcaccgtgcatgaggcgctctcgggtgacctcgaagctctctgggtctccgacgaagtgcagcgtcttcatcgtgatggcaatccctacagctcgatagccatcctctaccgcaccaatgcgcagagccgtacccttgagcaggtcttccgccgtgttggactccccttccgtatctatggcggacgctcattctttgaccacaaggagatcatggacgtcgtcgcctacttccgcgtcttggtcaacgagctggatgaagaggcgctcctgcgtatcatcaactaccccaagcgaagcatcggcgacacgacagtacagcgtgtacgtcaggccgcctcacaacagggtctgccgatgatgcagatcctccgtgaccctctcgcctatggcgtggaggtcaataagcccaccgctgcccgactacaagccttcgccgctctcctcgatgacctgcgcgcctacaaccagcaggaggatgacctctatgcgatcgctgagcgcgtgatcaatgagacgggcatcctcgccgatctcaagagcgacaccaccagcgaaggcaaggggcgcgtggagaacatccaggagctactcggtggtatcgacgaatacatccatgccgctctcgaggccgaccagacgccctcactcggcgtctacctcagcgagatcgcactgatgaccgaccaagacaagacgggcgacgaggaagactgcatcacgctgatgaccgtccactcggcaaagggactggagttccctcacgtatttatcgtagggctggaggaagatctcttcccctcgatgatgagcaatacggggaaggaactggaggaagagcgccgactcttctacgtcgcactgacgcgtgctgagaagacttgtcatatcggctatgcgagagagcgcttccgcaacgggcgcacggagttcagccgtcccagtcgcttcgtccgtgagctccccaaggaattagtgaccttcgactcgggattaagcagtcacgcctcgccctgggaccgccccaaggcagtacaccccgcaggcggtgacctcccgacggacttctccgaccgccctgtcttccgttcggctcctcccgcaccttcgcgccgtgtcctcatcgagcgcagagaggctggagatacgcccgaggagaagcacaagcgtatcggtgcgctcgctgtcggcggacgcgtcgtgcacaagcgcttcggtgcgggtgtcatcgacgagctcgaaggtcgtggcgacaatgctaaggctaccgtcaccttcgacacgggcgagacgaaaaagctcctcctgcgcttcgcccagctcgaggtgctttagggagaaaaccactatagctccgccgcatttaataacattattcttacctttaccgttacaagatatcagctttactacacttaataaaagactatggagaaagaaaaaccgatctattggcacatagacttaggggaagccaatagcgaagggaaacaatccagcttgatgactcaacttgagagcaaccacaccatcacactaactgaaaagcatcagtttcttggcaagtacctaagtgctcaaccacaagggacacttgtactcgtgtgtcaaggtaaaaagcctaaaaagctttgccaaataacagatgagccacacctcacgaatgaagaagctggggagcagagtccttatccagttcttcgatcagttgcaattcttacgaatgtccctgaggagaataccttcaacaccgaagacttccagcaaggtatctgtggctatttcacgaaacagtctaaaaagcaatacccatatatgaagaagctactcacccagctaaaaaatggaactcccctctctgacacttctaaatcagatacactactgctgaatgagtgcgtctctctattaaaggagaagaagaacatcatcttgcaaggtgcccctggcacaggtaagacatatacgacggcatctctcgcagtagccctctgtaacccctcgttcacaggactggaagaccatataaaagtgatggatgagtacgagcgccttcggcaggaaggacaaatagccttctgtaccttccaccagtctatggactatgaggacttcgtcgaaggagtgaagcctgagctacaaggagagcatatcacctacaacgtcgaggcgggtatcttcaaacaaatctgtgaacaagcacggactacggagggaaaggacatcgcagcttatattgatgactacctgaaaaggatacaaggcgaagataatcaacgagaaattccatccgtctctggtagggctaagctctctatctggtgggaaggtggcaaaaccctcaatatgcgcagtacggagtctagcccccaatctttcccaaacattgaacagattaaggatcaggctataggcaaaggaaagaccaagactcacgaggcctatgcacgggcttttatcgaagcagtaaagaaggaataccaaatagaagacaaggcctccacgaagcctcacgtcctgatcatcgacgagatcaaccgaggaaatatctcacgcatcttcggagaattgattacgctcctcgaagctgataagcgtacgggggacgggaagcaccccattaaggtcaccctaccctactctaaggatagcttctctgtcccttccaacctctatatcattggcacgatgaatacgaccgaccgctctacagggtctattgactatgccgtgcggcgccgctttgccttcatcacactcaagacggatcccgaggtcatcaagacttgtatcaaggatgacgcggtgcgcgccaaggccttagctctcttcaagcagatcaatggcgatagcacagacgacacgacttccttcatcgcgacacataaggcaggcgacttcgatctggaggacttgaaggtcggccacagctacttcttggctgagacgcttgaagctctccagatgaagatgcgctacgaggtcatcccgctcctccgcgaatatatcaaggacggcatcctacaaggcaaggaagaggatgagaagtacttcgcggcttgggagaagggcgaatgctttaatccttctgtcgctgaggcggcgaccgaagcatcttcggatagcgaagcctaatgctatatcaagagcatcagcgattggatggcatctcctccccccacgagaagtggaaggagtggatgcgtctgccgtctaagcagggaaaagaccgctggttctttcgctggcagtggaatggcgtcttccctggagaggaagatgagcaagctgagactgataaagggcctggctactacacctcctacgtcatcggagcgcagtggttcgatgatgaggagcctttagtcatcacaccgaaggctggctgtagcaacattgacttcctccagctcttcagccgctgtctgcaggcgggggttgagttagaagccttctctgagatctatgggatcgatatggagcagccgcgcatcaaggctcccgagctgcagagtgtactcagtcccctcatcgtcgtgcacttcctctccgtggtgagagtgatcgtgcagggtggactaaagaaagactacatccagcgagaagagaacctcaagaaggtcaagggacatatcagcgtgcttcgccacgagcgcacgaacgtcctacgcaagcgtcccgacaaagtcttctgtcgctaccaagagtattccatagatatcccagagaatcgcctgctgaagaaggcactgcacttcgtccgacagctcctgcaaaccttccctcactcggagagccgctcgtcgctggagcacacactcaatcaatgtctctcggctttcgcccacgtcagcgacgagatcgaggtatgggaactcaagcatctcaagcatcagaagctcttccgcacctattccgaagcaatacgtctggcgcagctcatcctgcgtcgctacgattatagcctgacgaacatacagagcagcgaagaagactgccccgtcttctggctggatatgcccttactctacgagcactacgtcctcgggctacttcgcgaagcctatggaaatcagatcaggtatcaggaaccggggcatacaggctacccagacttcatctgctacgacccgctactggtcatggacacgaagtatatcccccgcttcaaggacaagaccaagatcagctccgacatcatccgacagctctctggctatgcacgcgatcgaatgctcttcaaggatcccatcacggagccaattccttgtcttgtgatctatcccgaagaaggaactgagagaaatcctttccgagacaagcctcttcgtgagctactccttgagatagaggaagagaaatcggcttggggattctatcgcttagctgttcctctgcctacgctgagataagaaggaggcgcttcgcccagctcgaggtactttagctgaggctatacattattataataggcgtagggctgtctgcaggtagccctacgcctttctttagcctctcacgagaaagcgatacctttgctactgcctcacgggagggagctaccagcacgtgaaagcatgcactcctaccctcagcaggcgcaaaacctatttatacaaaccaaaacctgtacatcatgaagcgatttatctgcctcatggcgctggcgttacctatgacgctggcaggccaaactacagacactgccgactcagctcaggtcatcggcgaagtcgtagtacgtggtgcccgtgtcatggcaccgagtacagtcgtcaagatccccgctccacgccgtgagatccccctgacgacaaatatccttcctcttgagaagatccgcctcttaggctacaccgatcccgcacaagctatgcagaccgtccctggtgtaggagcattcaaggactatggtggcttccatatgttcttcctccgaggcttctacgagtccgtcgtcctcaacgatgggatgcgcgatgagcgtcatgcgctctggcaatcagcacctcttacggggatggcagcggtagaccacatcgaagtactcaagggtgcagcctcgatgagcgtaggtcactccgccctcggtggtgtcatcaacatcatcaataagcaacctaaggcccgtccagccttcgacgcaagctataccatcggctcgtacggcacgcatcgtatcacagctggtgggacaagtgcgatctcaagcaaggcgaatgcacgtgccgacgtggagtattcgaccagtgatggctggcgaggtaactacacgaagatcgccaatgcacatgccgctgtcgacattaagctttcgcccaagcacaagcttggcttcgctgcgatcatcagccacgaccagttccgtggtgattatggtcagccacacctcaagtgggatgtctatgatagctcgaccgatgagctggcttacaagcgaggtaccttccccagcagcgaacctgcctcgagagcttacaccgaccccaatgagttcctgacgaataagacggtcaagttccacgccaagtacaactacgcgatcgacgagcgctggagactctctgagcacgctttcttcgcttacgatagcctcaactactactccaccgacgggctgaactatctcacaggggcaaaagccaccggtgccaagcactattacctcgacggcacgacgaaggtacctgtactcatcgaccgcgtagagcgtgatggcttcggctttgcctatgggacgctgacggcacagaatcagatcgagctgacgggacgtctacgttggggcaataccagccacgcgatcctcgccgctcacaacttctcctacatggatcttcgtcgctctgaccgcgcactctataccggtgctggcgtcggatctatcgtgacgctgaaggatcctatcctcgatcagggcccgatctatatgaagtaccgccgcatgcaggtcttcaaggacctggtcaatggggtatctctgcaggacttcatgacgtggcagaatctgcgactccttgctggggtacgtatggacttcttccgtcgtgacttcggcatctacaatacggatgatcgcaagctcctcgaccgcaccaccgaccagatacttacgaatgccgcactgacttatcgcctcggcgctgtgtataatatcacgccgagcttcaacgtctacggctccgtgtcctccttcttcaagccccagcgcatcaccctctcgcccgaggtagtctatatggctgctgacggacatgagatgagtgccgaagagctcaagagcttcaagccactgacgggtcgccagtgggaagccggtctgcatctggatctcggcgaccaactctcacttcacgccgccgcctaccatatcacgctaagcaatatggtccgcaccaacctcggtgtagctgccgacggccgcaagatcggtggccctatcgggaagtccatcagtaagggtgtcgagctggagatgaattacgcgccctcttctgcctttgacttcaacctcggctattcgctcaccgacgcgcgtatcgccgaatacacgtcgagcaacttcacgcaaaacgtctccgcgggcaatcgcctcaagcgcgttcctcgtgataaggtctccgcttgggccttctacaacgctcctttcagtagcgagaccgtcctgagactgggcttcggtgcgatccacacgggcagcttctactccgacgagaccaatatctataagatcgatcccagtacgatcttcaacaccgtcgtaagcttctcgcctatgaaggcgctgagcctgcagctgaatgtcaacaatctcttcgacaccgtctactacagcacgacgatcaacagcacgcagttcatccccgccgaagggcgcaacgtccagttcaccgcttcactctccatctaattcggctctatcgtgcagctgaaacagcgcttttccttcccctcccttcgcctaaaagcggagggaggggaaggcgttttttgtcgggtcagaaggcaattcgggaggcctctacaaagcctgtctacacaaggctttcggaggggctggaaaaagtagaggtattttcaatcaaaagtagaggtattttcgactgaaagtagaggtgtttttattcggaagtagaggtacttttccagagaagtagaggtacttttccagagaagtagaggtacttcgtccaggaagtagaattacattgcccgagaagtagaggtatttctaccgcaaagtcatatcacttccagtagcttcgtcaggtagcttcggcgggatctccctacgggaggctgcagaatcaaccagaggaattatctttgtgagagaaacatctacctcatacactatgcctaccgctccgacaacgaagaagcagctcctgctcgatgcctttctcatcgtcttcggctctttcattttggccattggctacagtcttttcctcgccccagcacatattagcccgggcggtgtctatggtttggcgctcgtcatccgcgaggtcgctcgcagcctctttgggctagagctgggccttggtaccattgctcttgtcttcaacatcccgctcttcctcctggcgatgaagggacttgggaagatcaccgcagtcaagaccgtcgtgaccttcgtcctcgtcgccctcttttctgacctcatcgagacgtggtcaggcggccgtccgctcgtcgaagagtctattctctgtagcttctacggcggggccctgctcggagtaagtgtatggatgatcttcacggcacaaagtacctgcgcgggtaccgataccttggcgcgcgtactatctcgtgcgttcaacacgaaggtcagcaccctgatcatgctcatcgactcgctgatcgtcctcttagggctgtgggtcttccaagactggcgtgtccccctctattcgtggatcgctatcttcgtctacagcaaggtcgtcgacgcactccagcctcagaatccccacaagtcggtcttcatcatctccgacaagacgcaggagcttcgtgaggtactcatcggacaagtcggcgtgcgtggcaccttcctccacggccaagggatgtactcgggtacgccccgtgaggtgctcttcatcatcatcgagcgcaagcacttcgctatgctcaagaagctagtcaaggatcttgaccccaaggccttcatcaccacagctgatgcgtccaatgacagcatgcctctcctcccctaatctcacacatcacacactccatgcgacagcttttccgccccttacttgcgctcttctgtgcccttagcctaagctctatcgtcagcgcacagagcgagcagcgcccccagatcctcgtagagacgacaaaggggaacttcatcatcgagctcttcaacgagacgcccgtccaccgtgacaactatctcaagctcgtcagacaacatgcctttgacggcgtacagttccaccgcgtcatcaaggacttcatgatccaggctgggaacttaaagacccgcggtctctcccgcgagaagtccctccccggcgactccgacgaagcgacgataaaggcagagatcatgcccgagaagttcgtccacgtccgcggctatatcggtgctgcccgcgagggagatgataccaatcccgagaagaaatcatccttcagccagttctatatcgtcacggggaagtactataccgacatggatctggacgagatggaagctggtcgctcgtggaagtacacgcccgagcagcgcgaagcctacaagctccagggcggtgcagcacatctggatggcggatatacagtctttggccgtctactcgacggctggggcaccgtggataagatccagcgcgtcgagacggatgacaacaaccgcccactgaaaaacgtcatcatcaagagcatgcgcctctacaccccgaagaaatagcctgcactccacaccaaatacaagccgacgccccgcaccaagtacttgatgcggggcgtcggcttatctattcattccgctccaagacaaagtaccgagagccgtggctgtatgcgtacttattcgtatatttgaccacgttaaagcttcaattgagtggctttcacagccaactaactacaaactaacgatgcagcagaataaagcagggctctcccatgaggccttccgtggggtcgtagacggtaaagccgtccagctctacactctgatcaataaggcaggagccgaagcgcacttcatcaaccaaggtgctaagctcgtctctctcgtagtccccagccacacaggttatacagacgtcgtcctcggtcacgacagtctcgacgaatatatccacagcgaagaagcctacttcggtgctatctgcgggcgctatgcgaatcgtatcgctcgaggtcacttcaccatcgatggcacgagctatgagctccccatcaataatgggccgaacagcctgcacggtggactcaagggcttcaatgccgtcatctgggatggcgaagagctggctcctaacaaggtcgccttcacctacacttcccccgacggcgaagaaggttacccaggcgaactcactgttcgtgtcgtctacacgctcaccgatgaaggcgaactctgcatcgaatacgaggctacgactacgcgtcctacggtagtgaacctcaccaatcacgcctacttcaacctctccggcgaaggcgatccttcggtacatgaccacactttagagatcttcgccaaggaatacctccccaccgatgagacggctatcccctatggcgctcccgctgcagtagcaggtacgcctatggacttctctacgccccacctcatcggcgagcgtatcgacacggataccgaccaacttcgctgggcacgtggctatgaccacacctatatattggacaaggagctgggcaagctcgctattgcctcgcgctgctcttcacccaagacgggtatcgtcatggaggtctacaccgaccagcctggggtacagctctacacgggtaactggatgagcggcaacctccgcgggaagcacggtcaccgctatcctgcacgtgccgcactctgcttagagacgcagcactatccagacagccccaacaagcccgaatatccttcgacgcgtctgaatcccggagagaccttctgctcgacaacgatcttccgcttcacgctcgaagcttagccagctaacaaacaaaatccattcacataaacagtaagcaatgacacaacagaaacagactcagagctatctggtgccgttcatcatcatggtcgtgctcatggccctcgtcggtctgatcacgaacctgaacgggcagttccaagcacctatgcaggccgctttcctgcagaaatcgggctcgctcaccaatgcgctcaccacgctgatcaccttcgctttcttcctcggctacctcgctatggggatccccagcgccaagtgcatcgagaagaagggctataagaataccctcatcacgggtctctttgggctgatcgctgccttcggactgtatgagctctcagcctatgtcttcgagtcagtagacctcgtaaagttccaggctgctacggacgatcctaacgtcgtcatcatccccgtggcctactacatcttccttctggctggctttgtagcaggctctgctatgaccttcctgcaggcagtgctgaacccctacatcgtcgcttgtgacgtgaagggcacgacgggtgtcacgcgtcagtctatcgctggtacggccaactctacgatggctaccatcgctcctatcctcgtggcttcggtcatcttcgcaggtaagagcggtctggacatcgcactgagctcgctctacgtccccttcctcatactcatcgtcctcgtcggtggtctcatcgcagcgctctctaagctccacctccccgcgatcgcaagcacggagaagaaggaaggcgaagtcctcgaaaagagcgtatggagcttctctcacctcgctctcggtgtcgtcgctatcttcatgtatgtcggtgtcgaagtctgtatcgggaacaacatcaacctccatggtcagagcctcggtttcgagccttcggaggctgcactgatggctaccatctactggggtctgatgctcgtcggccgtctctgtggtagcttcctcagcggcatcagcgccagcaagcagctcctcatcacctctctgggcgcaggtatcctcgtcctcggtggtatgatcctgaacaatccttacctcctcgtcggtgctggtctcttccactccgtcatgtggggtgctatcttctcactggctatcgacaagctcggtaagtacacgtccgctggctcaggtgccctgatgatgggtatcgtcggtggtgctatcctgcctttcgctcagggtatcctcgctgaccgcctcggcggttggcagttcacctggatcatcgtcctcatcggtgaagcttacctcctctactacgctctcgtaggtcacaaggttcgccagctcccttagtcctctaaggacaatcccatcagtccccctcccgcaccccatcggtgcgtcagggggactgctatcataccacgtttactcactcctatcaagcccatcactcagatgaatacacaagctatccgcgacaagttcgcatctctctacggcgaagccggtaccctctacacgtctcctggccgtatcaacctcatcggtgagcacaccgactacaacggcgccttcgtcttccccggcgctatcgacaaggctatggtcgctgagatccgccccaatggtacggaccgcgtccgtgctttcgcactcgacctcggcgaatccgctgagttcggcctcaaggaagaggatgcacccagccagtcctgggcacgctacatcttcggcgtatgccgtgagatccagaagcgtggcggcaagatcgctggcttcgacacggtcttcgcaggcgatgtgcctctgggcgcagggatgtcttcctcagcagcgctggagagcaccttcgctttcggtctcgacgacctcttctctctcggtctctctaagtgggacatggcgaagatcggtcaggctaccgagcacaactactgcggtgtgaagtgcggtatcatggaccagttcgcttcggtcttcggtaaggctggcaagcttcttcgccttgactgtaagagctccgagtacgaagagcaccccttcgatcctaagggctatcgtctcctgctcgtcgacagctgcgtcaagcatgagctggccagctcagcctacaacaagcgtcgtgagagctgcgagaatgtcgtagccacgctcgctaagcgctatcccgagatcaagttcctccgcgatgcttcctttgctcagctcgaagaggtgaaaaatgaagtcagcgaagaggactacaagcgtgcagcctacgtcatcggcgaagtcgagcgcgtcctggctgtctgcgaagccctcgacaagggtgactaccagaccgtcggtgagaagatgtacgagacgcaccacggcatgagcaagctctacgaagtgagctgcgaagagcttgacttcctgaatgacctcgctcgtgaattcggtgtcaccggctcacgcgttatgggcggtggcttcggtggctgtacgatcaacctcctcaaggaagagcttcacgacagcttcatcgccgaagtcaagaagcgctacgaagctaagtacggcatccagcctaagttctacgacgtcgtcatctctgacggtgctcgccgcctctaaggcttagccgaactccatccaatacgacaccccgcaagggacttgccttctctggaggcagtcaccttgcggggtgtcgtcgtatagatacgtgtgggagcggtgcttacttctcaaggtaagtgatgacgatacgaaggaccttgcccgtatcatccgctcgatccacctcctgggggcggcccttgctatcgtagcgatacgtgaagccactatagatcgggggtatcgagtcccccagagaagccgagaagctccgaggtaagttcgccgaacgcatccccatacgatctccccagaggaattgcacatccgtccgacctcggaggtctgctaagtacaggcagaggtcggggtaggtgttgtttgctttggaggagaatgtccgctgctcgatcggctgacctccttcggctacggcagagcgcatcacattaccatcctgccatgtgaggaggatctccccgtagcgagaggacttatatcccgtgagacgcccgtcaccgtcatagacgtagtcctcttcactccagcgcactggcccattggcagtgtagtaagtctcttccatctcagaagctcgacccgcggtatccagtgacaggcgatactccgaaggcttcacgataccagcctcgagcttatgatcatcgcacgtgacgctgatgcccttgtccgtgtaggcgaggtgccaagtcgtgacggcctcgggcgtgctacaatcatagatcctccgcaccgaagtcagacgcatctcatcgtcgtagtcgaagctgatctcaaactccttgttgggactcccgttgtagtagtattcgatcttggagatatagtcgtagggcttctctgcgggcgaagaagcgacggcagtggtacgacttcccttcgtgcaagccgagacggcgctgagggcaaataagagtagagctattttcttcataggcttatgggcgggggactattcccacagcaggataaaggtacggataggagctgagctggggatctgcaagctattgacggtcttcgtcttctcgtcccagcaagtagcggggagcttcgacttcgggatagagaagctggcacgcaggtcatctaccacgacgacgatatccttcttgtcgggctcgatgcgcgtgatcgaataggcttgcttgatatctccaaaggtagagactgtagtgatgtcctgcgccgtatggaagagcggattgaggacgatcacacgatggactcgctgcttcacatccgcacgcttcttcgggctgatgctgaagaggggctcgaagtagcgtgtatagatcgtatagacgtcgtacttgtcatcggcgaactctccctgctcctccttcagctcaatctgggcagcaggcacacgcttgaagatatcctcgagtgtcttctcgctcgtgatatccccgatactatttttcgtgaccgtggacttgtagtaggtctcaggcatagggactcggccatcgctgtacgccacccgagaggggatctcaccgtccttcttcgtgaagaccgtgacgcccagctgatcatggctgggtgcgatacacatcgtgacaccctcggagggctcacccagtggaacgaagatcgtgtcacggcgaagcgtccccagctcgaccaggtcgctatgctccttacccaggagctgagagccagagatggagatccggtacttatctccttcgggggatatcgagagcgtgcgatgggagctgtcagcttcgttgggagaggcaaaagtatatgtcccagggaagttgtagggctggcgcttacgcaagatatagcgagaggactgatctccctcgatcttatttccattggcatcgaggatggtcagggtcccatcgccgaggacaaagagctccggaatgtcgggggtgttaaacgtcaagatgctatccttcacggtataggtcaccttcctgatgtcgcgcacatacccagcatattcgcccatataggtagcgtgtatggagtcatcgagggtgatggagagctcgatgccctcgcagtcgtcacagggcaccgtcccgagatagacggggggagcggcgtgcgatgaagtatcttcagcctgctgcttccctccgcctcggcaggagatgagtccgagggcgcagagggcgatgactagacgttcttttagcataccttatttgcttgtgaagtgattattcgtagtgaagacagggcaaagcaaacgccttagccctgcgcagtaaaggtagcgtatttaccgctcacagctctcgggaggaaagtacgttatcgaggagaaggcaagctacttagcgtaggaagtagcagagcttcgagagcaaaggagaggaggtcggcgaaggaagtagaggagcttggcggacaaaatagtagagcttgacgacgaatgcaaaggagtttcgtgagcgaactaccttgagttcgccaccattcaagcggtagttgctggaagattaaccgaatgaaggcaaagatttatacgtataaactcgggaattaatacgtattaagtcgggattttatacgtattaatttgcggattaatacgtattaatccgtaaccccaagcgataaaaacaccgaacttaatcgaaaaagatttcgcattctaacgatagtaactacctttgctcaaggaacaaacctcgcgaagtcaagtaccttatctcaggcacttcagctccttcgcccaactacacaatgtactatgacaagcaaaacccttcagtacgtcctctatcagaggaaagtcaccttcggcaagcaccgtggtaagagcatgcaagtcgcacgactcacgggccggtaccaggtggacttcgagcgcttctgctcgctcgtcgcccgcaacaccaccctcaactacatggaggtgcagagcgtcctcaacctcgccgcagacaccgcgcgcgacctcgtctcggagggcgccatcgtcgactatggtcgcctgggacacctcatgcccagcttcaagtgtcgcgccgtagaagagggcgagaagttcaaccccaccgtccacatcgaggaggtcaaggtacacctgcgtccctcgaagcgctacttcacgcttgaggatatccacttccgcaaagccccacgcaaggcgaagaaaagcaaggcgtagcggagacaagacagagttttttcctacctttattagggcaaagcgggagccctcccacacctttgccctacgccattcaaatacattcaccccttggacccatacctattatgagccagatcaagaactatatccgcgagcacgaagctcgcttcctcgaggacctcttcgagctcatccgcatcccatcggtcagcgccaagagcgagcacaagcccgacatgcagcgctgtgcagagtactggcgtgatcacctcaagaagctcggcgtacagaccgtagagatctaccagacggcaggtaaccccatcgtcttcgggcactatgagaaggacccttccaagcccacgatcctcgtctacggacactatgacgtcatgccccccgagccactcgagctgtggaagagcgaacccttcgagcccgaagtacgcgacggccacatctgggcacgcggtgctgacgacgacaagggtcagtcgatgatccagatcaagggcttcgagacggctctggcactcggtctcgtcgagtgcaatgtgaagttcctcctcgagggtgaagaagagatcggctcgacgcacctcgagcagttctgccgtgagcacctcgagatgctccgcgctgagaacatcatcgtctccgacacgagcatggtcagcgccgagacaccttcgctcaccacgggcctgcgcggtctggcctactggcagatcgaggtcacgggtgccaaccatgacctgcactccgggcacttcggcggtgctgtcgctaaccccatcaacgagctctgtaagctcatcgctcaggtccaggacaaggacgggcgtatcaccatcccccacttctacgatgacgtcgtgcccctctcggatgaagagcgcgcgatgatcgcgaagatccccttcagcgaagaggagtacaagaagttcctcgacatcgatgacctctttggcgaagtcggctaccacacgctcgagcgtaatagctgccgtccttccttcgacgtctgcggcatctggggtggctatcagggcgaaggctcaaagaccgtccttccctccaaggcctatgctaaggtctcttgccgcctcgtagctaaccaagaccaccacaaggtcagccaggccttcatcgactacatcgagagcaccgctccgaagtacgtccgcgtcaaggtcacgcctatgcacggcggcgaagcctacctctgccccatcgacctgcccgcctatcaggcagccgaagaggctgtcgcagtagccttcggcaaacgtcctctggcggtacgtcgtggcggtagcatccccatcatcgcagccttcgagcgcgtcttcggcgtgaagaccatccttatgggcttcggtctggagagcaacgccatccactcgcccaacgagaatatgcccctggatatcttctacaagggtatcgaagccgtcgccgagttctacaagatttaccccaagcgataggctcctcaccccgaatagatatctatgacctctatcctaataaagaatgtcctccacgggacgacgactaccgacgtcctcatcgagggaaaccttatcactcgtatcgccccaggcatctccgctcccacaggagtggaggtgcttgacggcaccgacaaggcgatcatccccggcttcatcaatacgcatacccatgcatcgatgacgctcttccgtggctacggcgatgacctaccgctgatgacgtggctcgaggactacatctggcccgtcgaggcgcagatgactccgcatgacgtctatgtcggcgccaagctcgcctgccttgagatgctacgctcgggcacgacctgcttcctcgatatgtatatgcacccgctgaagaccgccaaggcagtcgaagagatggggctacgtgcacatctctcctacacgctcttcgaccaaggcaaccccgagcgtgctgcactggaccgcaagcgcagctacgaatacatggagcgcttcggcgagttcagcgaccgcatcaccttcacccttggcccacacgctatctatacggtgagcggtgaacagctgcagttctgccatcagttcgcagtagagcacggtgtgaagatccacctgcacctctctgagaccaagggcgaggtagaggaatgtatccgcctgcatggcctcagccctgtgcgctacctcgagaagctcggcatcctcagcgagcacctcgtgctggcgcacgtcgtctgggtagatgatgaagagatggatctgctggccaagcacaacgtctccgtcgtgcacaacccagcctccaacatgaagctcgccagtggctacaccttcaagtacgaggagatgaagcgccgtggcatccgcatcggtatcggtacggacggctgctcttcgtcgaacaacctcgacatggtcgtagcgatgaagctcgcttccttcctcgggaaggcttggcgcttcgacagcacggcgtgcaaggctgacgacatcttcgcctctgctacagctgtgggtgcaaacatcctcaacctcaacgcagggcgcatcgaagagggacgcctggcagacgtctgcctcgtcgacctcaatacgcctgagctcgtgccgctgaatgacctcacgtcgaacctcgtctatgctacctcgggcagcagctgcatcgacaccgtgatcgtcgatgggcgcatcctcatgcgcgacaagcacgtgccagggcaggaagctatcatcgcggaagcccgcgaggtagcccagcgtctcttcagtaagcacagataaatgcggggacttccctccatacttcaccgagtagcacacgcagccttcggcaggcgactaagcgagcgtctctggctcttcgtcttagtcttcctcgcccagctgcgtgtgctactggcttatctaccctatcagaccgaggtgccctcgggcgaagtactcccgctggtcctcagccagctccttcgcatcgggggctgggcgagcctcctgaccctcctcttcgccctctccccgtggaagtggctgacccgcacgctcgggctcctcttctccgtcatcgtcctcaccctctccgcctacgagctctacctcatcgggctctaccatgtgacctacaacatggacttggcgcagatcatgctctcgaccaactggcgcgagggcagtgaattcctcgacagcatcaccgccgagcaagccctccgcgtgctctgccagctcacgcctgccgtcgtcatcgccttcgtagtatccctcgtcttcaggaagaagtatccctcctgcatcaccctgtgctgcagccttacgattacacttctctccctcttcgtgggtctcgaaaacatctatagtaacctccgtctatgtcgtcggcattacaacttcggaggactcgaatacgctggtattgatcgcacgatcttcaatacccttagtgctcacaaagcgatgaagcatatcgctgcagagctggatatgatacgccgctcccagcacaagctcaatagcgtcgtcattaaccccatatctaaggctccactcaacatcgtcctcatcctcggagaatcagcccgtcgtagcagtatgcactgctatggctatcctctgcagaacaccccctatgcagacagtctaattcaggctcaggagcttattccattctccaatgttgtctcgccagcctcagcaacgatcctctccaatacgcgttcactgaccttctacactcaggagcaaggcgaaaagccctggtataagttcccttcgattattaatgtgcttcgccaagcagggtatgctacagcctggatcgcaaatcaagaaatcacaggtaagtactcgatgtctaacctactgggtagacaggcggatatcctcacgggcaatccggccttcttcaaaggactgggcggagaaggtgtagcaaatcgccccgacttgtttgatgaagtcatactcccctttctccttcatcatcgagacctatcagatagtctccgaatgagctcccccagaggactcttccagatcgttcatcttatgggttcgcatatgacctacaaagagcgatacccccaagcattcaacaagttcacatccgatagcctacccatccacaagggagaagctaaggatctggtcatctcagcctacatcaatagccttctctataccgactacatcatccacgagatcatagagcgctaccgcgaggagaatgccctcatcatctatctctccgaccacggcgatgcgctcttcgacgaagactaccccgagctgatgggccatgcactcgtaccccgagccgtagagatcccgctcttcgtctacttctccccacagctccgtgaggagcgctccgacctctggcgtcagataggtcgtcagcgagataagcgtatcctctcggatctgctcacacacgctctcgtagatctcctcggcatccataccgagtatacacagccacgcttcaacttcttcgcgcccacctacgacgaccgtcgtactcgcatcgtcgtctcccccacgtcgaataagaagatggtgatggagtagcccgcttcacaccaagcctccccacgtatatattcatcaagcgatcacggcatttttgatgccagctatctccctatatattgggtatatcgctccgctaaatctgcatacactttttttctacttttacagcgtcaaaagacgaacgaacaatagatcctatatgaagcgattactctatctactcgccacactactcgctcccatccacgtgtcggcacagatgcttttctctgagaatatgacgatgagcatcgatagcacgaagacactccaggggacgatcagcccttcactcaacttccagaccgagaaggaggaggtattcaccttacgcaatagcgccaatatcaacctgctcatcaagcgtagccgagtgatcaacctcataaataagtttgagttctccacctacggtaagaaagtgaccctcagtggtgggtatatacacgccgagtatcgctacctgctggaccgagcctttgaggtctacccttacgcggagtctcagtgggctgcgagtagagggatggcctttaagttctctacggggattcagtcgcgctatcgtctgctgaattcctcaacaaccctcatgtttgctacactgggcttattctacgaatatgaagagtgggagcgcccgatgcccgctacgaatggccccaagtatgcctacagccaccgcatcaagagccatctctcgctcagcatgcggaataagatcggcgagcactgggagctcacgacgaccgccatccatcaagcgactcctgacacttacttcaaggaagcccgcttcggaggtgccgttgacctcaagtacgacatcacgcccaccatcgggatacgaggcacctaccgcctgatctatgatacagaccccatcgtagacatacgtaaggactacaatgtagtcgatgccggcctcgacatctcattctaacagcagtctaatcaatctcacctcattcatataatatgacagcactttcctacctccagtcggatgacctcttctatctgaatgtcttcctgaagctactcctgggcttacttgccattgtcctcgtcatcaacaagtctggcaagggcaatctagcaccaacctctgcgatagaccaggtgcagaactatgtcctcgggggtatcatcggtgggatcatctatagcccagccatctcgatcctccagtttgcagccgtcctcgcgatctgggcctccctcatcatcggcctgcgacgactcaagacgaagaaccatagcatcaagagattcatcgatggcgctcctgttgtcctcatcaagcacggggtcctcgatgtagaggcctgccgcaaggctaagatcacagcgaacgaagtagcattcaagctacgccgcgagggggtctaccacatccgcgacgtgaagcgagctgtcttcgagcagaatggagagctcatcatcgtcctgaaaggcgaggagaaccccaagtaccctgtcatcacagatggcatcgtacagaccagcgtgctggatgacgtagaccgcaccgaagagtggctcgccgaggagctgcaaaagatgggatatgagtctgctgcagatatattccttgccgaatacgaaagcggggagctgaagctggtaccctacaactccaccgtgcaagaaaaggagtagatagcgccgtctcccttccccgattattgctatatttgttttgcccttgaggcaaatactattcgcaatattcggcaagatatatccctattattatgctcgaccaacactatcacgaggcggccaactacctggcatcacgcctgccaaaggatatcaagaccgccatcatcctcggtagcggccttggcaagctcggcgacatgctcgagaatcccaccattatcccctacacacagatcccccacttctcacactctacggctatcggccataaggggaatctcatcgctggtaccctctcgggcgtaaccgtgctgtgcatgcaggggcgcttccactactacgaaggctaccctatggagcaggtcaccttccccatccgcgtgatgaagctcctcggtatcgagaacctcctcgtctccaacgccgcaggtggtatcaaccagaccttccgcgtaggtgatctgatgatcatccgcgaccacatcaacaacctccccaacccgctcatcggccccaacgtcgagatgttcggcccacgcttccctgatatgacgcgcccctacgaccgcgaattcatcacgaaggctaaggccatcgctcaggagctcggcatccacgtccacgaaggtgtgtatgtcggcctcacgggtccctcctacgagacccctgctgagtacacctactggtctcgctcgggtggtgacgctatcggtatgagcaccgtacccgaagtcatcgtcgcacgccacgctggtatccgcgtcttcggtatgtcggtcatcaccaacgaaggctggcacttcgatgatgacttcgtcaacgatggtgacgacgtcgtacgcgcagccaacgctgcctccgaccgtatgggccgcatcttcagcgaactcgtacgccagctctaagtatgactccatagcacaaagacatcagccccggtgtaagtacaggcacttacactggggctgctttgtagcgatctcaagggaggggaggcacaaagctcttctccaatcacacaaatattagcgtgtcgcaacaattcgcagacctatgatgtcgtcaagtagttcgctgatattggatcctcatcgcagctccggctccgcagagaattatatttagccctatatagattaaatagccgtgaggctacgttccctttatggaggtcggtacatctaaattagacctatcgacttcagtcctcctcggcatacgcacttacgcagtgcttcgctatcatcaccctttacctcaagtagtatatgtctcatcagtcggcggtatcttctgattcgtctcgatccatcaatctccatagtcaggtcttacgaggcttggccatcctctcgatcatcctccacaactatacgcactggatgtatggagcgatcttcgagaatgagtttacataccaagaatggcacgtctcgaagctcctgaactacctatcacaccccgacggaagactccccctacagcttttctccttctttggacactatggcgtcgtgatctttgtcttcctcagcgcctacggcctggagaagaagtatggacgcactaccaaggaagttcgccccctccccttcatctggacgcactacctcaagctcctctcaatgtgtatcgtgggctatgcggcatacctcctgataaatgctttctacgtaagctatcccacctctacgatcttcggagtactgagccagctcacaatgctcagcaatctccagatttgctcctttgacacctttgccccagggccctattggtacttcgggctcatgctccagctttatgtcgtctatcgtctgctccttttccgtcgctcgtggggcgtgatcgtcggagcaatcttagtgtgtagcatcgctcaagccttcgtcacccctgatggagctgtcatgacgtggctacgtaccaatttcgtcgggagcatcctccccttcggtcttggcctcctctatgcgcgctatgaagaggatatccagctgagcaagacggcatacggaatcattgccctggtctcgatcgcactgatcttcgtgacaagcctctccctcctgccatggatcacgactccgatcttcgtctgtgctctcggcatctcatgcacccaactccttccaaagagtgtgaataaacctctcgcttgggtcggtggtatctccgcagcgatcttcgtcagccacccgatcgtacgccagctggggcttgcactagcagagaagctccacttctccccctaccagagcgtcctgaccttcctcatcagcgcactactgctcggagcacttttccagcccatcctcaatcgctcatccaagcttttcatgaggctggctaagcactaagcaagagccaagcaagatatatagcacgcggggtggaccaatattggtccaccccgcgtactttattaggagctcccaactacgtataaggaatgggggtgtggcacaggacgaaattgcgtacctttgacagaggaaagcgcgagcatggggacgaccttatcccgtgcccctttaccaccgacacaaaacaagcactattcaaagcaagcgatatggacatcaacgaagagcttctacaccacccagagaatgatccagcctacctcgggctcaaggtcaatcaaggcgtggcagcccagcctatggtcaatcccaacctacgacgcgtagctcgccgcacctatacggtggacgaattcgtcgaaggcatcctccgctccgacatcacctgcctcagtcaggccgtgacactcgtcgagagcaaccgccccgaccatcaggccatcgcccagcagatcatcgagcgctgcctcccctacgcggggaagtcaatgcgcatcggcatcacgggggtaccaggtgcagggaagagtacctcgatcgacaccttcgggatgcacctcgtcaagcaggggcgacgcctggcagtcctcgctatcgaccccagtagcgagcgctctggtggtagtatcctcggggataagacccgtatggagcagctctcccgcgagaagaatgccttcatccgccccagtccttcggcagggtcactcggcggtgtagctcgtaagacgcgtgagacgatcgtactctgcgaggctgcaggcttcgatacgatcttcgtcgagaccgtcggcgtcggtcagagtgagacggctgtacactctatggtagacttcttcctcctcatccagctggctgggactggcgacgaactgcaggggatcaagcgcggtatcatggagatggctgatgccatcgtcatcaacaaggccgatggtgataacattgacaaggccaaccttgcggccacccacttccgtaatgccctccacctcttccctcctacggagtcaggttggcgccccaaggtcctcacctactcaggcttctacggtcttggcatcaaggagatctgggatatggtcgatgagtaccgacacttcgccacggactcgggctacttcgaagagaagcgccagcgccagaccaagtggtggatgtacgagagcatcaatgaggctctgaagagctccttctaccagagtgaggctattcgaagcctgcgccccgaggtagagaacgacatcctctctgaccgcctttcctccttcgtcggagctcagcgtctcctcgacgcctacttcaagagtctcaagtaagcaagcagaaggtaaaataaagtataagggagcggggtggaagtgcagtctccaccctgctctctgatgctaagtacaccttgcatattcgaagatttaccgtatatttgcagggcaaaaagaatgatattcatacaattaaaatatttcatcaactatgacgaaagcagaagtggtgagcgatatcgccaagagcacgggagtagataaagagactactctggcagtggtagaggcgttcatggagtcagtcaaggactctctggtacgtggagaaaacgtctacctccgtggcttcggtagcttcatcatcaaggagcgcgcagagaagactgctcgcaatatctcgaagaagactacgatcatcatccccaagcgccgcatccctgccttcaagccctcgaagctcttcgcctccaaggtcaagtagtggatcgaaagccgaactatagtaaataatcatataatcaaaagcagctatgccaagcggaaagaaaagaaagcgccataagatggctacgcacaagcgtaagaagagactcaagaagaacagacataagaagaagtaatgtcacatgcgcgggggtagggcagttcacaagacgtatgccttgcccccgtacactttatactacttccttttttactctactatcattaacgaatccgccaagtgaacagtgaactgatcgtcgacgtctccgccaaggagatctcgatggctctactggaagaccaacgactggtagagctccagcgcgagcgtcgtgacctggccttcgccgtcggagatatctatctcggacgcgtcaagaaggtgatgcctggcctcaacgcagcattcgtcgatgtaggatataagaaggatgcttttcttcattacctcgacctggggatgatctaccaagcgcagcagcgcttcctcgagcaaatcgagaagaccaaggcagtacctgccttgagcaagatccccaccttccctgacctgccgaaggatgggaagatcgctgactacctgaaggctgggcagaatgtcctcgtccaagtcgtcaaggagcctatctccacgaaggggccacgcctctcggctgagatatccatcgcagggcgaaacctcgtcctcgtccccttctccgacaaggtatccgtcagcgctaagatcgaatcacacgaggagcgagcacgcctcaagcagctcatcctcagtatgaagcctaagaacttcagcgtgatcatccgcacctcggccgagggtaagcgagccagtgagctcgatcaggagctcagccgtctgctaagacgctgggaggagagcatacagaagctccccaagatcaccaagaccccaaagatcgtctacgaagagtccagccgtgccttaggcatcctgcgcgacaccttcaacccctcctttcagagcatccacgtcaacgacaaggcctactacgaggagatacgcgagtatgtccgtcagatagcccctgggcgtgaagatatcgtccgcctctatacggggaacctccccatcttcgatgagaagaatgtcaccaagcagatcaaggcgtccttcgggcgtactgtcacctgtaagagtggtgcttacctgatcatcgagcagactgaggccatgtacgtcgtggatgtcaatagtggcaatcgctcccgtaagagcaccgagcaggagggtacagcgatcgacgtcaatctcatcgcagccgaagagctcgctcgtcagctccgcctgagagatatgggcggtatcatcgtcgtcgacttcatcgacatgcatgaccagaagaatcgtcagctcctctatgagcacatggtcaagctgatggagagcgaccgcacgcgacacaatatcctaccgctgagtaaattcggcgtgatgcagatcacccgtcagcgtgtgcgccccgccacccagatcaatacggatgagacgtgccccacgtgccttggcacagggaagatgaagtcctctatcctcttcaccgatcagctcgaagaaaagctccgtgacttagctccacgcttagacacgtcctacatcaacgtccacgtacatccctacgtggccgcctacctcaccaaggggttcttcatgtccatcgcccgccgctggaagctccagatagctcgcgggatacgtgtgacccccaatcagagcctcggcttcctcgactacaagttcgtagacaaggaaggcaacgaaatcgaggccctcgaagaataacctacgataaagcccgtagaagatccctcccctatcccatagcgatagtactcagggtatcttctgcgggctttatctctactgagagcgagacccgatacgatgaacgcctacccgtccaagctcgtcgagcgagccgtagagcagctctctaccctcccaggggtagggcgcaagaccgctctacgcttggcgctacacctgctctcacgccccccgattgatacccataccttcgctgatgccctcgtagagatgcgagatggtatcgtctactgccggcagtgctacaacatcagtgataccgagctctgccccatctgctccagcccccagcgtgatagctccaccgtctgcgtcgtacagcatgtaggcgatgtgatggctatcgagaataccggtcagtaccgtggtgtctaccatgtcctcggcggggtcatctcccctattgacggcattggtcccgacgatctgaagatccccgagctcatcgagcgggtacgtagtggcagtgtccgtgaggtcatcttggcgctgggcacgacgatggagggggacacgacgaacttcttcatctaccgcagcctcgcggggctggacgtacgcctctcggtcatcgcccgcggtgtagccatcggggatgagatcgagtatgccgacgaagtgacgctcggccgctccatcctcactcgcacggacttcgatcagtcgctaagcttctgacctcatgcacacgcaggctatcggcatcccgggcgagcacatacagctccgcgccctatcgcaggaagatctcccgctgctactcagctgggagaacgaccccgagggctggtactccagcggcacgatcaatcccctctcctccgacttcatccagcgctacatcaccgcctcgagcacgcatatcctcgagacgggctcgatgagcctcatcatcgaagggctcaagacccgctcggcactggggcatcttgtcctctacgactacagccccatccatcgccgtctgggcgtcggtatctacatcgaccgcgaggctcgcaagacggggatcggctccgaagccatccgcttagccctacgctacgccttcgacaagctccgttgtgagcaagtctatgccgaggtcttggcttccaacgaagcctcccagcagatgctccgcggcatcggcttcgagcataccgccacgctccctcgctggcactggcaagacaaccactacgaggacctccattactatcagatatggcacccatagccacagagatccagcgtctaagagaggagatcgaggcgcacaactacgcctactacgtcctctcatcccccaccatctcggactacgacttcgaccaactgctcaagcagctggagcgactggaggcggagcatcccgagctcatcacacccgactcgcctacccagcgtgtcggccgtgaccgcaccgagggcttcacgcaggtagcgcaccgctaccccatgctctcgctgggcaatacctacagctacgacgatgtacgggagttctacgagcgtgtctcgaaggacttgggcggtaagcccttcaccatcgttgcggagctcaagtatgacgggctctcgatctccctgacctatgagaagggactactgacccgtgctgtcactcgtggcgacggacagatgggcgatgatgtgacggctaatgtacgcacgatacgctccatccccctccgcctgcgtggcacgggctatcccgagagcctcgaggtgcgtggggagatcctcttgcccttcgtggagttcgaccgactgaatgccgagcgtcatcgtgccgacctccctctcttcgctaatcctcgcaatgctgccagcggtacgctcaagcagctcgatcctgcgatcgtagctgagcgccgactcgatgcctacctctactacgtacctgggcagcccagtctccccgacagtcactacgagcgtctgcagctctgcaagagctgggggctgaagatctcggaggctacccgtcgctgtcattcgctggaggaggtcctatccttcctcgactactgggagcaggcacgtgccgaagcccccgttgccaccgatggcgtcgtgctcaaggtagactccatcaccgagcaggaggagctgggctatacggcgaagaccccacgctgggctatcgcctacaagtatcaagctgagcaggctaagacgcgcctcatctccgtagacttccaagtcgggcgtacgggtgctgtcacacctgtggccaatctcgatgccgtggcactctcgggcacgaccgtgcgccgtgcctcgcttcacaacgctgacttcatcgaagccttcgacctgcacatcgatgatcaggtcctcgtagagaagggcggtgagatcatcccgaagatcgtcggcgtcgtcacggaggagcgtcccagcgatgctcagcccgtcatcttccccagccactgccccgcctgtggctctcccctcgagcgaaacgaaggagaagctgcctactactgcacgaaccaagcgacctgccccccacagcagacggctcgtatcgagcacttctctgggcgcaaggctgctgacatacgcctcggagctgagaccatcgacctcctcttcacccacggtctcgtgcatagtatcgccgacctctatcgcctgaagctggaggatctcctgcagctcccaggcttcaaggagcgcagtgctacccgcctactggagagcatcgaggcctctaaggagcgccccttccgtgccctactcttcgggctcggcatccgctttgtgggcgagacggtagctaagacgctcgtgcagcgctatgcggatatcgatgccttaggcacagcgaccttcgaggagctcacggctatccccgatatcggtgcagtcatcgccgagagcctcgtccactacttcgcctcacccgagaatagggagttcatctcggagctccagcgcctggggcttcctctgagccgtcgccccgaggaagagccactcccgacgaccgatcatgctgctatctcgggcaaggccttcgtcatcagtggtgtcttcacccaccactcccgcgaagagtacaaggccctcatcgagagcctcggggggaagatcgcttcatccatctccagcaagaccaactacgtcttggccggcgccaacatgggcccagcaaagctcgctaaggccaccgacctcggcatcaccatactctccgaggacgaattcctcgccctcatcgagccccacgaaggagagcagcccgccgcctccaccgatgaggcggacacggccgacctccccctcttctctaatccctcctaattccctctccacgacgatcacgaatcctatcagctatctgtaatggacattatctttatctgtatcctcgtcttcttgatcatcctcgcctgcttcgacctcgtatcaggggtgagcaatgacgcggtgaacttcctcaactccgctatcggggcgaaggctgccccgttcaaggtcatcctcggcgtcgctgccgtggggatcttcctcggagcctccctaagtaacgggatgatggatgtagcacgcaatgggatatacaaccccgcctacttcaccttccaggaggtcatgaccatctgcttggcggcggtagtcaccgacatcatcttgatcaacatcttcaatacactcgggctgccgacctcgacgaccgtctccatggtctttgagctcctcggggcttccttctgtatgtcggtgctcaagggctttgacgatcccagcctccagatgctggatatgctgaatgccaccaaggccctacaggtcatcatcgctatcttcctctcggtagctgtggccttcttctttggctcggtggtgcagtggatcacgcgtgtgtgcttctccttcaactataagaagactctcccctacctcgctggtatcttcgggggcatcgcgctgacctctatcgtctacttcatgctcatcaaggggctcgaggagtcgaccttcgcctacaaggactgggtcaacagccacacactggagctcatcatcggctgcctcatcggcttctcgatcatcatgcaggtcctacactggtgcggcgtgaatatcctcaagatcattatcctcgccggtacgctggccctctcgctggccttcgcgggcaatgacctcgtgaacttcatcggggtacctctctcgggtctctccgcctatcaggactacatggccaacgggaatggggcctacgacacctacctcatgggagcgaataacctccccgccaagacgccctatatcttcctcctcggctcaggggtcatcatgacgctggccctcttcttctctaagagcgcgcagaatgtcatcaagacctcggtgaatctctcccgccaagacgacggggaagagaccttcggctcatcccgtatcgcccgtggtctcgtgcgtaccagcagcgccatcagcaccttcctcgagcgtgccgtaccgcagaaggctcgcacatggattgactcccgcttcaataagcaggagctcacgatggagcctggtgcagccttcgacctcgtgcgtgcctcggtgaacctcgtcctggcagggctactcatcgcactcggtacctccttcaagctccccctctccacgacgtacgtcaccttcatggtgggtatgggtacgtcgctcgcagaccgcgcttggggtcgtgagagtgccgtcggtcgtgtgacgggtgtgatgtcggtcatcggtggctggttcatcacggctggtgcggccttcatcatcgcgatcatcatcgctacgatcatgcgctatggtggcttcatcgctatgatcatcctcatcgcggtggcgctcttcctgctcttcaacagccatctcatccgtcgcaagaagggggatgctgatgatgaactcttcgtggctatcctcaatgccgaggatcctacgacgatgtggagcctgctctctgagcacgtccgtcagaatcagatcggcctgctcgaccacgtcagtcaggactacctcgacatgaccaatggcctcttcagcgaagatctgcgccgtctgaagaagaccatgcaccatctcgacgagcacaagcgtgccttcaagacgatgcgccgtaaggagaccatcgggctgagacgcatggccagcgacgaagacatgctggagaagaacatgtggttccacctcggtgccaatacctgtctgcagatgatctatgccctcgagcgtgctacggaggtagcggtagagcacgtagacaacaactacaaccccatccccgaggagtaccgcgctgagttcgcccccatccgtgaccgcgtcatcgactacatcgcacaggtccaccagctcatctccagcaagcgcatggaggatgccaagaaggcgaggaacatgggtaaggagctgcgcgagatcgtcaaggatatgcgtaagacccagatgaagcgtgctcacaagggccgtcgtgaggacctgcgtgcctcgatggtctacctcaacgtcctcatcgagaccaacgagctcctcggcaacctccgccacctcgtcggctatagccagaacctcctcgacgaagaggccgaaggctaagcccccccccttcgccttctgcaggcgaagaccaagaagccacgggcgcgctacttcatcatagcgcgcccgtggctttttattatgctctccccgatgagggtagcgatctgaatgcgggaggcgtgcacctcggcgctccattcgtaacacccccgaagtgggcaaaagaagacggctcccccgctaccgccagcggtagcgggggagccgtcgtatatagaggatgtcagtggcttacttagccaagacgaggtagtagttcttcttaccgcgctgtacgagcaggtagcgatcagcgatgagctgggcagaggtgatgaggtcatcgggactggcaaccttctccttgttcacgctcacaccacccgaggcgatgagcttgcgcagctcgcccttcgaggggaagactgccgcatcttcggtgaggaggtcgatgaccttcacaccaccctgcagcttgtccttcgagacttcgaactggggtaccccctcgaagacggagaggagtgtagcttcgtcgagcgactggagctgctcgcgcgtgccctgcccgaagaggatgcccgaggcagccacagcggcatcatagctctcacggccgtggacgaggacggtgatctcctccgccaggcgcttctgcagggcgcgctcgtggggagtagcagcctgctgagcctcgagacctgcgatctcctcctgcgtcagcgtcgtgaagatcttgatatagcgtgccgcatcggcatcattgacattcagccagaactggtagaaggcgtatgggctcgtgcgctcggggtcgagccacacattcccgctctcggtcttaccgaacttaccgccgtcggccttcgtgatcagcggacataccagagcataggcctcgccagcatccatacggcggatcagctccgtacccgtggtgatattcccccattggtcagagccccccatctgcagacggcagccgtagtggcgatagagatacagataatcgtagccctgcaggagctggtagctgaattcggtgaaggacatcccgttggagttctcgccgctgaggcgcttcttcaccgagtccttagccatcatatagttgaccgtgatatgcttaccgatgtcgcggatgaagccgaggaagctgtagtccttcatccagtcgtagttgttcaccaacacagcagcattgggggcatcgctatcgaagtcgaggaacttagacagctgcttcttgatgcaagcttggttgtggcggagcgtctcttcgtcgaggaggttacgctcggcggacttcatcgaggggtcaccaatcatccccgtagcaccgccgatgagggcgatggggcgatggcctgccagctggaggtggcgcagcatcatgaccccgacgaggtggccgatgtgaagggagtctgccgtggggtcaatacccagatatgcagaggtacgctccttctgtagctgctcctcagtgcctgggaacatatcatggatcatcccacgccagcgcagctcttcaataaagttgatcatttttcttcttaaaaagaggtgattatctgtatgtatagtggtacaaagatagctaaagcctcgcacctgcgcccctatgcgcgcgaggatagcccgctaacagagggtaagggactcgccctatcacacaaaattctctcatccagcagagggagaagtgctatcccctcgaagaaaaagccgccctcccatagtggtcttctcctatccaggcacgtagtcttaaagaccacgtacgtaaaccctatcatccacgtacgtagacattagatctacgcacgtagacgcagcttatctaccattcgtccgtgacttttattcgcactcgtaggaagtcattccactactgctctcagcttttctcaccgaagagacgagcctcacatagcacggtggcgcagcgtgtatcgcaaggttctcttctctggtattgctgattacaagttttttcttaggtttgcagtgtggagagaagcccttctccatgcaatacagagacacaagagcacaacgcaacgacaccactttcatctgatcgcgctatgcactacacgtttagatactctaccccactcaaggtctacaccgccctctgcataatggttcttgggctaatctgctactatgcattcagatcaagcccttggtttatgattgtcctatacagcgggatgatctttatatcgctgctctattccgccctctctataccccgttcgatagaggatgacggagagactgtggtcttgaggcggctcttatggtcgaagcggtatagccgtacgatctacgacatctccgaggtaagtggtatggagctaacgaagagctacgccatcgttggctcggcaggttacttctgctataatggcctcttctacaaatcaaagatgggcttcttcaatctcgtcgctacggaggagactggtcattacctacgcatccagcgtaagggtcgtcgcccgctctacatcgcctaccagcctgccctatcctactaatcgcatcttcccacacaccccaagcaccacaccttccacaagacactcattactccgcaccctattcctcaccatcggaatggggcgttagcgcaaagcaacaccatcacttccatctaatcgcgctatgcactacacgtttaggtactctacattcgtcaaggtcatcaccttcattggattatgggctcttgcactcatcctttatcttctggcgaccgtagacggcttatcatcgtttgccttcctcctctgggcaggcgctttgggcctcatctaccctcccctctccatgccccgttcgatagaggatgacggagagactgtggtcctgagacgactcttatggtcgaagcggtatagccgcacggcctacgacatctcggaggtaagtggcattaatttaatgaatggtctccgtgtcttcggctcgggagcttacttcggctatagtggctacttctacaagacgaagattggcctcttcaagctcctcgctacggaggacacaggccattacctacgcatccagcgcaagggtagcaaacgaccgctctacatcgcctaccggcctacccaatcctaatcatagcatcttcccacatcaccccaagcaccacacgacacatgaaacccttacttctccgcaccctatccctcgctatcggtataggtagtctgtgccttcacagcacgaccgcttcagctcaagcgacccaaaaacccgacaagcactatgccctgagcgataccatagcgcttaccatcttcgactatgctcaataccgagcctactaccaaaaggaatatcgagatgtcccctccgaccccaagtcccaacgctggcttcagctcctgcaaatcgggagtaagtatcagggctacgtcaactatggggagctacgtgccgactcaatatggaacgcctcgataaaggcgggcaagagtgatgccgaactgcatcccgaatggtctgcagctagggatgaatcacagcccgacgtgaagctcctctttgaccgcaacaagggtgtcttggacgcacacgacagggtctacatcaacaagtaccactacagcgagcccatcccccagcagcagtggacgatggccgagggcgatagcacgatcttaggctacacgtgccacaaggccacgacccgcttccgtgggcgagactacgtcgcttggtacaccgaggagatcccctacccctacgggccctataagttcggcggtctccctggtctcatcacctgcatctacgacacccagcgcgagcacatctacacgcttgtaggctttgagaaagcccccgccttagactacatctactacggcaacgggcgacgcaaacccaccgagggcacacgcgaggaggtcaataaactccagcgacagtaccacgagcagccgaatctcttcaagtccgaccttatcacgccagcccctggcactaagatcaaccgcaagaagcccaagccctacaaccccatcgagctggaataaccccacagagctatgatacgttcgcttctccgcaccctctttctcgctatcgggatggggtgcctaagccttcccgccacagggcaagcgcccaaagcaggccttgatcccagcagagtatatgacccgagtgacagcattcagaagaccatctttgatcatgcgctgtaccgagcctactaccagaagctgtatcgagatgaccccgctgatccgcaagcctatcactggatgcagatcctgcagataggtaggagccaccaagcctacctcgactatggcgagctacgtagagactccatctggaatgcagcagcaaaggggaggaaaagctatggagaaatcgaggctgatcttgatgtggcctttaatgataccttttccaagcagaagctcgtcttcgaccgcgccagagggatagtcaacgcctacgaaaggatcttcatcagcacgtaccactacaccgagcccatcccccagctccagtggacgatggcgcggggcgatagcacgatcttaggctacccatgccacaaggccacgacgcacttccgtggacgagactacatcgcttggtacaccgaggagatccccttcccctatgggccctttaagttcggtggcctccctggccttatcacctgcatctacgacacccagcgcgagcatatctatacgcttgtaggcttcgagaaagccccgtcagaggactacatctacgagcgagcgcgacgccactggttcgagaccacgagggaagtgctggcgaagcagcagaagtacttccacgagcagcccaacctcttcacccccgacatcctcacccctgaccccaggaacaaggccatcaagcgcaagcccaagccctacaatccgatcgaactggagtaaatccccacagagctatgaaacagtccattctccgcaccctattcctcactatcgggatggggtgcctaagccttcccgcgataggtcaaaagcccaaggtcttccctgactacacctatgtatatgagccgagtgactccattcagatgaccatatttgacgacgcacagtatcgggcctactatgagaagcagtaccgagacgacccgtctgtcccccaggcttatcactggatgcaggtcctgcagataggcaggaactaccaagccttcctcgactatggtgcgctacgtagtgactcgatatggaatgcttcggtgaaggcgaggaagacatacggggaatttgaggcggagagtgacgctgcctatgaagctaccttatctaatctgaagctcatcttcgaccgctccaaggggatgatcaatgcccacgagaagatctttatcaacaagtaccactacacggagcccatcccccagctccagtggacgatggcgcggggcgatagcacgatcttaggctatacgtgccacaaggccacgacacgcttccgcggacgggactacatcgcttggtacaccgaggagatccccttcccctatgggccctttaagttcgggggcctcccaggcctcatcacctgcatctacgacacccagcgcgagcatatctacacgctcgtaggcttcgagaaagccccttctgctgactacatctacgagcgagcgcgacgtatgtggttcgagaccacgagggaagtggtggcgaagctccagaggaactaccacgatcagcccgacctcttcacctccgacatcgtcatccgtgaccccaagagcaaagccgtcaagcatcatagtaagccctacaaccccatcgaattagaataaatctgcccgtccactcctccccgccctctatgaagacagtaagactcctccgaggcatcgccttatccctcagtatgtgcatcctctccgtaatgagcgctgaggcacaagagaccaacatggccccattcattgagagcttgatacgtgccttcaaagcaatgaaggctgacaccgtacgcaaggacgtcattgagcccaacctctatcgtgcattctataaagcagagtaccatcctgttgcgaaaagcatggcgccagcctatgaatggacgcaagtattgcaaatcggagaaacggcccagcgctatatagaccatggaaccttgctggctgattcgatatttgacgatggagtcaagacgggcaaggcccccgaagagttcgtcccaggataccataaggcaagcaagagctccgtcatggatagccacatacttttccttcagagagaggggaagatggagtacttcgatcggatcgtcgccgaccacttcacctacatagatagtatccctcagcagcagtgggagctggtcgcaggagatagcatcatcgcaggatacacctgccaccgcgcccagacccgctaccgagggcgcgactacacggcttggtacactgaggagatcccgctgagctatggcccatataagttcagaggactccctggactcatcacctgtatctatgataaggaccgtgaccacgtcttcaccctacagggcttcgagcgcgctccgctcggggaggtcatttaccgcaagaagaagtcctacttcaagacgacgagggagcgcctccagcaggccatccgcaactacatgacgaacccctcgggctacagcacaccaaagatcaacgtccaggggaagaagaccgccaagccacctaagccctacaacccgattgagctggagtaacatcctctctcctcacgttcccgataccactatgagacactacgactacacgccccgactcctttggtgcctcctcacactgctcctcctgatccccatagggcaagcgcatgggcaaacgagtgagcgccacgtgaccgcccgcatcgtcaatgccgagacgggtgcccccatcgtcgacgtcctttgctcagcatgggacggcgagcggcaccgcacagccttcacgcagagtgacgctaagggcgaggcgcgctttcgactcacgccccaagaccagtttctttccttcgtcctcttaggctatacgaagcaagagctacgcatcagcgagctttcgggagatagcttcaccgtgcgtctccagccctcgacgacgccgatacgtgaggtacatatcaaggcacgccccatcaccgtgcggggcgacacgctccgctaccgcgtcaaggcctttgcaggcaagcgagaccgctacctcgaggatgtcatcaagaagctccccggagtagaggtcaaggagaatggacggatagagtatcagggtacaccgatcaataagttctacatcgaggggcaagatcccttgggcagcaactacacgcaggcctcgcgcaacatccccatcaatgccgttgatcaggtcgaagtcatcgagcacaaccagcacaagcgcgtcctacagggcctcgtctccagcgaccaggcagcactgaacatccgtctgagcaaggcctcacgcttccgtcccttcggggaagtctcagcaggaacgggcctgcctgcgccactctgggagggcaaggccttcctcatgcaggcctcaccgacgaatcagctcatcacctcactcaaggggaataatacgggggtagacctctcgtcagacttcgagcagcagcacgacgcagggagtggcctgccgcagatctcccttccctcgaccaccctacagacctcctccccacagcgcccacctctcgacatcgggcgctacctcgatgatagaggcttcaactggggtatcaatgacctgcagaagctcggggagtacagcaacctccgcatcaacgtctcgggataccatgaccgccgacacctcagctccgagagcgagacccactacctcggcactacccctctcgacctctacgagacctctcagctgacccgaagccccaactactacaatgccgccctgcgctacgagcacaatgcgcccaagcgctatctcgtaggtgagctgcgcttcggaggtaggcgctccgaccaaacggagggccttcgctccaatagccgtgagtacaccttggggctacggcaggagccgctttggctccaagcagccctgcagacgaccctccgcttaggcggtacggtcctcgacttcgtctcctccacacgtggctacaccgcaggagagacgctccgtggcgagtggaccgaggcggcactccccacacagacgctctacgagcagcgccgcatcacccagcttcacacgacgcatcaagcctcgacgagcttccacttctcccataccaccgcacttcacacggggctggaagccacggcggacctacggagctttgacacgccctacgccagcctcgcccgctcctgcagctaccgcgacctctctctggcgctggatgcgtccttcagctaccgccccgagggcttctatctctcggtggggagccccctgaccctcgagcgggagatgcttcaggtaggtacgcgacacgatgaggcgacacgcctacgtatcgcccccttcttcagcatgagggcgagcctcgggcagcacggggagctatggctacgcgggagctactctgagcgccccgacctcgacggctactacagctccagcacccagagacgaggctaccgcctctactaccagagtctcgagcacctctacagtcagcagaccctctccagctcgctccgcctcacctatcgcaacccgctggagctcttcttcacctacctccatctgagctacaactacacgacccacggctactaccgtgactatacttatagtcttgaccgcacggtgagcatccccatcgacagcacgcaccaccgccagaccttctccgcagcgggcgtcgtcgacaagtccatcgcaccactcgggctgagcctacatgccgagctacgatacagccactcgagctacatctcctcacaagcacatcgcgtctatcagatccagagcgacctcctcgtgcccagcctcacgatgacgtgcaacaagctctccccgctggagctggcctacaccttcgagctcagcagcctatggatacatcacccgctgacgaagctacgccccgtcctctccctacgcgagagcttcgaggcaggcctccccctcggtgatcgctggctcctcggcctgcagatcgtccactcgatgaatgaggtcgctccgagggagtacaagcataccctcttcggtgacctcgacgccacctggactgtcagcaagcgcgtcaagctcaccgcccgcttagcgaacctatggggacagactgcctaccaagtgacccgcctctccgccaccgacatctcgagcttcgccgtaccgctccgcccccgcgagctcatcgtgacggctacgcttcgcatctaaggcgctcatctcttagtcctttctcccccaccttcgcctcacagcacgctacgaaaaggcgtgctgtggggcgctttttctacgaccgaaggaggtgcttttgaaaggccttaaatagggtgcagaggagtgcccttatcccattgtccattctcttgtaactcgggcagttgaatatcatatattcgttgtacctttgtaggagacagaaaagtctatatagacagatttgctaattcgaattagttttatggaaattatcaagatcgtcgggcgtgagatcctcgactcccgtgggaaccccacagtagaagtagacgtacaccttgcgtgtggtatcatcggtcgtgcagctgtacccagcggtgcatccacgggcgaaaacgaagctctcgagctccgtgacggcgacaagggtcgctacctcggtaagggtgtcctcaaggcagtagagaacatcaacaacgtcatcgcacctgagctctacggcatgagcgccctgaaccagcgtgagatcgacctgaagatgatcgctctcgatggcaccaagaccaagagcaacctcggcgctaacgctatcctcggtgtatctctcgccgtcgctaaggctgccgctcagtacctcgacatccccctctatcgctacatcggtggcacgaacacctatgtactgcccgtacctatgatgaacatcatcaatggtggctcgcactctgacgctcctatcgctttccaggaattcatgatccgccctgtgggtgcatgctgcttccgcgaaggtctccgcatgggtgctgaagtcttccacgcactgaagaaggtcctccacgatcgtggcctcagcaccgctgtaggtgacgaaggtggtttcgctcctgccctcaacggtacggaagacgctatcgagtcgatcctcaaggctgtcgaaaaggctggctacgtccccggtaaggacatcaccatcgctatggactgtgcttcctctgagttcttcaaggatggcatctacgactacacgaagttcgaaggtgaccacggtgtgaagcgcacgatcgacgagcaggttgagttcctcagccagctggtagagaagtatcctatcgactctatcgaagacggtatggctgagaacgactgggaaggttggaagaagcttaccgacaagctcggcaagaagatccagctcgtcggtgacgacctcttcgtcacgaatgtagagtacctccgtcgcggtatcgccgaaggctgcggtaactcgatcctcatcaaggtcaaccagatcggtacgctcaccgagaccctcgacgctatcgacatggctcaccgccacggcttcacctccgtcacctcacaccgctctggtgagacggaagatgctacgatcgctgacatcgctgtagctacgaactctggtcagatcaagaccggttcgctcagccgtaccgaccgtatggctaagtacaaccagctcctccgcatcgaagaagagctcggtgacctcgctgtctacggctacaagcgcatcaagtagtcgactcccatacggcccatctgcgctgaggcaaccctgcccgcgcaccgaagccgtaggatataaatagccccgcaggatgacctcctgcggggctatttcgcttcctgctgtgcaacaaagaagcggggaagaatagttatctttgtgagacggggcttttcaggtgagcatatccccgagagccccatatatagatagactccatcatcactccatagcgctgtatgcaacagtcctcctccgcctggactcgctgggctcccccagtgacccgcaacttgatcgtcatcaacttcatcatctacttcgcctcagtcctgctactgcgtcgaggctttgaccttgcggaggtcgctggcctgcactacttcgagtcctcagccttccgagtgtggcagctcctgacgtatcagttcctccacagcacctcgtccatcgagcacgtgctgtcgaatatgttcgcgctctatatgtttggctcgagcattgagtacttctggggcagcaagcgctatctgatctactatctcctctgtggtattagtgcagggctggtgcaggagctgagctggtactatgagctaagcgaggtcgtacaatacgcgagcgtacagctcccatcggggatcgtgccactcgacaccttcctcagtatgctgaataccgtgggggcatcgggagctgtcttcggcatcctccttgcctctggagtactcttccccaactcatacgtcctcattggcttcgccataccgctgaagatgaagtatttcgtcttcctctacggcgcctttgagctcttcgccggtatccacaatacctggggtcaggtagcccacttcgctcacctcggtgggatgatcggcggagctatcctcatctatctatggcgtaagaagggggttatccgatagctcttcgatgaactggcagaagctatataaagagtattggcaagaggggggcatcgttatgcgcctcctcatcctacataccttcgcctacctccttattgggctgacctcttgggcctgcacgctcatcacacccttacgctggtgggatctcgggctctcgctctccttctaccctgagtgggacaaggtactctaccacccttggtcgctcgtcacgtatgccctcccccacctaaacttcttccacttctttggcaacatgtgcctgatctatgcgctcctccctgtgatggcgtatcgactcgggacgcgcagattcctttggatctatatcggaggcatcatcgcaggggcattgacctacctcttaggctaccagctcctcggagcagagatcatacctcccctgtcgctgcaaggtgcttcagctgccatcctcagcgtatgtgctgcggcagtcatggtagatcgcaagattctctcctcgttcaccctacgctttacgggaaatcgcatcccacccatcgcactctgggtcttcctcttcctcgtcttcctcggtgctggacgaggaaacttaggcggtcacttggcgcacctcggcgggctcctcttcggtatcgcctgcggtctctactaccgcaagcaagccaagcatcccgcaagcgtttttaccagcgaccgagaggaactgctacgcaagacccgtcactcgagcttctccagcctaagccccgaggagcgtcgtcgcttgatgaagaacctccccaaagacaagaactaacctaccccacagcaaccaaataatgaagcttcgcgctctcttcaccttcagctcacgcgtcgcacgggtcatccttctcgtggggacactcctcatctctgggatctatctcctcggagcctactcggggtacatagcaccgaagacctggatcctcccgagcttcttaggcctactattccctgggctgatcttagcgcagatccttgtgagcctcttctggctcattgcgctcgacaagaagcgccttatcctcgtcggagtcgtgtggctcatctccctgccacagctcctcacctacttccccatcagccgctcggcgaagatcctcggcgacgaagacgatgcgatacgcgtgctctcctacaacgtctgcgccttcggcttcaagccccacaccaagaccagccccaacgccatcctgcagtacatcaaaagcagtggtgctgacatcgtctgcctacaggaggcgatgctcaatcagaatccttgggcaggtgtcgtctcaaagaccctgcgtagctatctcgacaaggactacccctatatccaggtgaatcgcgtgaatcgtggcgggagtaccctcgcgcttctctccaagtaccctatcaccgataccaaggagatacctatcgactcttgggtcaacggagctatagcctacaaggtgctcatccgtggtgaagagacactcatcatcaatgtacacctcgagtccttccatctgcgccgtatcgatggcgaggactacctacgcttggcctctcaaggcgatgccgtccgcctgaaggacgccatgggcgcaaagctcgcaccgaccttccgtgcccatggcgtacaggcgaacgtcatccaccagctcatacagagctatggtaccgagcgtgtcatcgtctgtggcgacttcaacgacacgcccctctcctatacccggcgtaagatcgccgatgggctgaaggatgccttcgtcgagcgtggcaatggcttcggcttcaccttcacgacgcgccccttcatcgtgcgcatcgaccacatcctctacggctctgccttccgtgctatcagctgcgaggtcgacaagacggccagcgaatcggatcaccatcctatcgaggccgtgctcagcttaagcccagcacaagagtaatcccgcacccatgctctgcaagaagatacgccagtacctcattgacttcctcgtcggctcgctctgggtacagagtgaaggtgacgatcgcttccagcgccgcttcgaagccatcggctataccgacgatcctgagcagatgaagctctatcctatcgtcatcatcccctcaggcttcttcaagatggacgtctatggcaccgaggagtcgatgcctcccctcccgctgaagacgtggcgagggataccactactcttcggcgagccccgagaggagtggagcgctgatgggagtcagctcatcatccatgccgacctactcgcctcgacctacttcctcatctcccgctatgaggagatgtaccgacgtagtgagcgcgactcctatgggcgattccctgggaagagttcgctcccctatcgagcaggcttcctgcaccgccccatcatcgacgagtacggcgaggccctcagacagatcctcctcgagacgggcatcgctgagcgccacaacctacgcctcgaggagcgtccccagaccttcagcagagtcaacctcacccacgacctctcccgcccgtacaactatcgtggctggagaagcttcctgcgtgcatggctcaagcagaagaagagtcccttagaggcagcacgccttagcttctcagcagatgtcgaggacgactacttcaccttccctaagttcctcaagtgggatcgtaatacctgcgatagcttgggtagggatagatcggatatcttcctcttcatccgcatgccctcgcgccacccgctggataagccttactacagcctccactcgcactatctccatcgcatcctctcgatagccgccaagcacaaggtgctcttggcgctgcagtgtagctatgccgcggggcaccagtcggagctcatcagcaaggagcgccatcagtttgagaaggccttccgtcagcgtccccgtggcctgcgacacaataagctcacctcctgcgagcccgaggacctccttcaggcctatgtctcgggcttccgcaatgattactcgatgggctacgccgatgtcgtcggcttccgcctcggcacctgccgtccggtgaagttcatcaaccccaatacccgccttctgacagagctcatcctccaccctctcgtgctgcgcgacctgacgctgagtgatcagcgctacatggcgctggagcaagatgaagccgagcgcatcgcacacgacctcatccgcacgacagctcgatacaacggcgagctcacgctcctctggcacaacgacctactctcgcagaagacccacccctggcactccgtcctctatcgctccatgctccgtctcatcgaagagctcggcgcagagccccaagcgtagtcccagcccctcacccgctcgcccatgcaagcctcccccttccgcccactcaccctccgtcatccctctcccttcccttatatagtctttgctggcccttgtagtgccgagacagaagcacagaccctcgcgacagccgaggcgctgcgtgcccgaggtatccgcctcttccgtgccagcctatggaagccccgcacacgcccaggctccttcgagggagtaggtagcgaaggcctgccttggctccagcgcgtcgagcgtgagctgggtatgcaggtcgccaccgaagtggcctccgccagccatgtggaggaagcactcgctgcagggctggataccttctggatcggagcgcgcacgacgacaagcccgtttgctatggcagagcttgccgaggccctcagcggagagcgcgtcaccgtgctggtaaagaacccacttaaccccgacatcgagctgtgggaaggcgctctcctgcgcctctaccaagcaggtatccctcagataggggctatacaccgcggcttcagcacctacgccaaggggctctatcgcaatgcccccctctggcaaatccccattgagctacgccgtcgccatcccgagcttaccatcctcgttgatcccagccacatcgctgggcgccgagacctcgtaccgctggtcagccgtatggggctggagatgaacttctccggcctgatggtcgagacgcaccccgagcccgagagtgcttggagcgatgccgcacagcagctcacccccaccgacctcatcaccatcctctcccagctggatctccgcccagtccgaccgaccgatgaccgcatgctcagcggactacgggagaagattgatcatatcgatgccgaactcctgcgcctgctgcgagagcgtatgatcatctccgaagagatcgggcatatcaaggccagtgcccacctccctatcgtgcagcccgaccgctaccgcagtctgctggaggaccgcttatcacagggccatgccttgggactggatgaaggcttcctcagggagctcttcagctcgatccacgaggcctctgtacacacccagcacaccgacagcaagtgactatgaagctccatcgctttgtcttgaccttgggctctaatagtgagccacagaaacacctctctctggcccaagcggggctccgcagtctcgggctggagcgcctcaccttctccccagctcgcgaatctgcccccatcagctttggactctccgatgcgctcttcaccgaccaagtagccgtaggagagacaagtatggagctggagaccttcgccacacacctcaaggctctggagcgtcgtacaggccgtacccccgagcagcgcaagaagcaccccgaagctatccccgtggacatcgacctcatcacctgggatcgggagatcctcaagccccgggacatcactcgcccctacctcatcgaaggtctacgcgacctcggtgaaccactcctccccgaggaataaccccaccgctttcacccgagacttcacagagtgctcacagccctctgccagctcgccgtatcttgaggtaaaagcaaccagtactggtcaccgagcgaagtagtactggtcaccagtagttaccagtagttaccagtactggtccgaagcgcgaccagtactgatcgggtcagtgaccagtactggttcatttacccctccccgcaatgctctttccccctacgacttacgccgcagcaaaataccagtagcaaaattccctgaattcactaacttagcggtacgatacgacacgatctatacctctatccatcatgatcaagagacttactcctctgctctttgctctcggcacgctccccgtgctggcgcagcagacacctaagacagaccccacacaggtctattcgctccttgatgggaagaccatcatcaagaccaatcccttcagcgacatcttcgggaacctcaacctcaagatcgagcgcatcctgaccgatgggcttagcgcacagctatccgtcttcacctctcctaagtccaatcaagggcgacagttcggagccttccacgacatcacttcggtgacgagtagtatagccctctactccttccagcccaagtatgtcgctgtcgtgccgcaagtacgatggtatctcaatgatggcttgggctatggcttctatatgcaggcgtattatcactaccagcacactcagtttaccaaccaagagatcagctcgcaccgcactctaattggcaatgatacacctgaatttactctggtatatgatggtcaagctacgatgcatggcttcggctttggtgtcggggcacagtggctctttggccggagaaagaatgtcgtcttagactggtacatcgctgggatcggccgtggcttcgtccgaggtaagctcacggggagctatacctcagccctcgaccagcagagtttcacagagcgcatccgtggcgaccttcccaaccaaggagaaggtactgagttcacctttgatgccacacagcctcgggtaaaggtatcaaagatcaagtaccagtcctatatccttgatatggggctctccatcggcttccgcttctaacgattcattaattcagctggggtcacaaagccccagccctctctacatatttatgcgaaagatacttactgcccttatgcttagcctcagcacactccccgtgctggcacaagaagcacccaagcccgaccctacccagctctactcgctccttgatgggaggaccatcgtcaagaccgaccccttgagcgatgtcgtcgggaatctcaaccttcaggtcgagcgcctcctcgcccatggagtcagtgcccagctcggtctctacttcacccctcagggagatgaagggacgcagtctggagccttccactaccgtagctatgctctcagcaactccatcgttttctctcccgagcaaccgaagtatgtagccttctcgccccagataagatggtatctcaatggaggcttaggacatggcttctacatacagggctactacagattccagcatagcgacttcacccgccagcatatatatgccccacacaaggtggtagacgacaagatgcagcatatcagcgttgactacgacggtcaggccacgacacacagctacggcctcagcatcggggcacaatggctcttcggacgacggaagaacatcgtcttagactggcacatcctcggtgtcggacgtggcttcacacgcgggagtcttacaggcacctatactcctgcggtcagccacgcagaggtcgaaaaggctcttcgtcaagatatccccagagatatgacgaatgctgtgtttaccttcgatgccacacagccccaggtcaaggtttcaaagatcaagcaggcttctgacatcttcgatatgggcgtgtccattggcttccgcttctaaggcgaaccgaagtagcgcacgcctcttcgcgtaaagccctccccattctctccctcatagcaaaggctacacccgaagtcagacttcgggtgtagcctttgttttgctcctaagtggggtatcttattcggaagggatgaagagcccccccccgagcgaggcagtgcaaaccaatagtggtcggtagtgcaaaccaatagtggtcggtagtgcaaaccaatagtggtatggggtatgaacgaatagtggtctgagtgcaaacaactactcattcacaccccataccaatagtcctttgcacttcatcaccttctatagagaagaggaagtacccagagaagccctctcttccctgcagaagacggagctacgaaaggccagcatctcgaagttttctctatcgtggtaggcaggggtagtaatagacgtcggagaaatttgcagcacacactacgcgggaaggagcaaagcgggtaaaaagcgtatctttgcagggtaacttgggtggagtacttatcagctcgtccctaccccctgcaaggcaaggggcgtgtggccatcgctggagtacgcttcatccgatatataatagcgcatagtggaaacaaagtacatcttcgtcacggggggcgtcgtctcttccttaggcaaggggatcgtagcagcctctcttggcaagctcctacaggcacgtggctacagcgtcacgatacagaagttcgacccctacatcaacattgacccaggcaccctcaatccctacgagcacggcgaatgctatgtcaccgatgacgggcacgaagccgacctggacctcggacactatgagcgcttcctcgacatagcgacctcacgagccaacaacatcactaccgggcgtatctaccaaaacgtcatccgcaaggagcgtaagggtgactacctcggcaagaccgtacaggtcatcccccacatcaccgacgagatcaagcgcaacgtcaagctccttggcctcaagaagcagtacgacttcgtcatcaccgagatcggtggtaccgtcggcgatatcgaatccctccccttcctcgaaagcgtacgacagctcaagtgggagctcgggcagaactgcctgtgcgtccacctgacctacgtcccctatatcgctgcggctggtgaagtgaagaccaagcccacccagcactccgtcaagcagctccaggaggtcggtatccagcccgatatcctcgtcctgcgtactgagcacacactcagcagcgacatcctccgcaaggtcgcactcttctgtaatgtctcagcagagtccgtcgtgcagagcgtcgacgtccccaccatctatcaggtacccttggcactcggcgagcagcatctcgatgagatcgtgctcaagaagagcggcatcacgcctgaggctaagcctgagctgaaggagtggaagaagttcctcgccctgcgcgaagaagctaaggacgtcgtcaccatcgccctcatcggtaagtacgtcgagctgcaggatgcctacaagtccatcgacgaagcgctcctgcagtctgctacctacagtggccgcaagctccgcctcatctccgtacacagcgagaaggtctctgaggagaatgtagccgaactgctgggggatgttgatggtgtcgtcgtagctcctggcttcggctcccgcggtgttgatgggaagttcgtcgccctgcgctatacccgtgagcacggcatccccacgctgggtatctgcctcggtatgcagtgtatggtcatcgagttcgcccgcaacgtcttgggatggagcgatgcccacaccacggagattgaccccacgaccacacacaaggtcgtcgacctcatggaagagcagaagagcatctccgacctcggaggctcgatgcgtctcgggggctacgactgcgtgctgcgccctgggtcgaagatcgctgccgcctatggctcggacttcatccgtgagcgtcaccgccaccgctttgagttcaacagccagtatcgcgaggcttacgaagcagctggcatgatttgtgcaggggaaaaccctgacacggggctcgtcgagacggtagagctcagcggacatccttggtatgtcggcgtgcagtatcaccccgagtaccgcagcacggtactccaccccagcccgctcttcctcgccttcgtgaaggaagcgatcaagcacggtggcgagcgccatcaggcctaagagccccccgcgactgtatcacatcgcctccagcgccccactggcgcgtgtggaggcatagtatagattaatggataagaatacactcatcggagccctactcatcggggccgtactcatcgggttcacctggttcagcaagcccgacccgactcagcagacaccgccaccagcggataccacccacgtcgtagctcagcagcccgctgccccacaggccacggctgacaccgccgccctcgacagcacgggtgcccccatcctcgccccttaccagcaggctaaggaagagaaggtcatcgtactgaagaacgagaagctcgctctctccatctccacccgtggtggtgcccctgtcgaagccgtactcgcagactacctcgaccagtcgaagaagcccgtacatctcttccgtaagggcgacacgcgtctggacctccccctacgcacgctcgacaaccgtatggtgagcacggctgatgccaacttcgacatcatcgaagctaccgactccactgctaccctgcgtatgcagctcgacgagtcagcttacctcgactacgtatataagctccgtagctccgactaccgcgtggacttcaccatccgcggtcacgagcttcgtcacttcctccccgtgaacattgcgctgcaggatatcgagtggcgtcagcgcatcccccagcaggagcagtcctggaagttcgagggtcagtatagcggtatctactaccactaccctcagggcgatgtagaccgcctcgagacgaccagcgaagccaacgaagatatccaagagacgctgcgctgggtggccttcaaggacaagtacttcagctccgtgctgatcgcttcggctacgggcttcaaggataataagctcaccctcaagaccgagggcgaaggtagcggctacgtccgctctggcgacttcaaggggaccttccccatctcggtcaaggagacggagaccgtcgtgccctttatgttcttcttcggccccaacgactacgaccttctgaagggctatgacgaaggtgtcgacaaggcaaacgccctgcacctcgaccacctcgtctacctcggcatgagcgtcttccgctggatcaaccagtatctgatcatccccgtagtgaccttcctctctggcttcctgtcgaactggggtatcatcatcctcttgatgacgctcttcatcaagatgcttctctggcccttcacctacaagagctacatgtcgcaggcgaagatgcgtgtgctgcgccctcagatcgaagccatcaacgctaagtaccccggcaaggagcaggatcagatgatgaagcgtcagaccgagacgatgaatctctatcgctcggctggtgccagcccgatgagcggctgtctgcccatgctgctgcagatgcccttcctcatcgcactgtacatgtacttccctacctccatcctactgcgcggacagggcttcctctgggctgacgacctctctacctatgacgcggtcatctcgtggcatgcgaacatccccctcatctcgtccttcctgggcaaccacctgagcctcttctgcgtgctgatgacggtgacgaacatcctctacacgcgctacacgatgaatcagagcccctcgggcgaaggtatggccggtatgaagaccatgccctatatcatggcgatcatgttcttcttcatgttcaaccagaacgcctcgggtcttagctactactacttcgtctctacgctcatcaccatcctgcagtacttcgccttccgctggacgctcaacgaggacaagctcctccgccagctcgaagagaacaagaagaagccccgcaagaagtctaagtggatgcagcgcctcgaggaagctcagcgcctccagcaggagcagcagcgcaaagcccagaagcaaggcaagcgctaaccctccgcaccctcctatgcacaaatagataagtcaaagatgcgcatactccccgctgcgggaggcatgcgcatctttacttctttcctctataccgactccatagatttatcccttcactcaatggaacccctcaagcacgaatgtggcgtggcgatgatccgcctgcgtaagcccctcgcctactaccaagagaagtatggcacctggatgtatggcctcaataagctctatctcctcatggagaagcagcacaaccgcggtcaggaaggtgctgggctcgctgtcgtcaagctccacgcggctcctggtgacgaatatctcttccgcgagcgcgccgaaggtgcctccgccatccaagagatcttcaactccgtctacgcctccttcgctgatgtccccgcagagaagctcgctgatgcagcctatgccgagcgctacctgcccttcgctggctcctgcctcatgggacacctgcgctatagcacgacgggcaagagtggcctgacctacgtgcaccccatgattcgccgcagcaactggcgcgccaagtgcctctccatctgcggtaacttcaacctgacgaacgtcaccgacgtcttcgaagccattgcctccgtcggccagcatccccgccacgtctccgatatgcatatcctcctggagcagctcgggcaccgcctcgaccgcgaggtcgagcgtctcttcaaagagagccgtacccacggcctcacaggcatggacatcacgcactacatcgaggagcgcatcgacctggcgaacgtcctgcgccagtgtgcccccctctgggacgggggcttcgtcatgtgcggtgagacgggtagcggcgagacctacgccatgcgcgacccccacggcatccgtccagccttctactatatcgacgatgaagtcgtcgtcttggcctccgagcgccccgtcatccagacggtgatgaacgtccccgccgagcagatcaccgagcttcgcccagggcaagctatcctcgtcaaccgcgctgccgaggtccgcaccgagcagatcatccagcctaagcgggatcaggcttgtagcttcgagcgcatctacttctcccgaggtagtgacgtcgacatctaccgcgagcgtaaggctctcggtgagcagctcacgcccgctatcctctgtgctatcggtggtgacctacgccactccgtcttctccttcatccccaacaccgccgaagtcgcgtactatggtatgatcgagggtatggacaagtacctcacagaggagaagctccgacagatcaagagcacgccttcgccctccgacgaagcgctacgtgagatcctctccgcacgcgtccgcaccgagaaggtcgctatcaaggacatcaagctccgcaccttcatctccgagggtaagagccgcaatgagctcgcagcgcacgtctacgacatcacctacggcaccgtagagcgtggcgtggacaacctcgtcgtcattgacgacagcatcgtgcgtgggacgacccttcgccagagtatcatcggtatcctcgaccgcctgggcccgaagaagatcgtcatcgtctcgagctgcccacaggtccgctaccccgactactacggcatcgacatgagtaagatgaaggagttcatcgccttccgtgccgccatcgccctcatcgaagagcgaggcatgcagcacctcctcgaggagcagtatcagaaggcgcgtgagctggagagcgtctcgcacaatgagcacgtggagaatgtcgtcaaggcgatctacgctcccttctcgcccgaagagatctcccgcaagatggtcgagctccttcgtcccgtagacaccaaggccgaggtcgagctggtcttccagagtctggagggtctgcatacagcgatccctgggcaccctggtgactggtacttcagcggcaactaccccaccgctggcggctcgcacctggtgaacaaggctttcatcgactacatcgagcaggactaccgcaagtaagcgccccccgctccaccccatacctcatacaaagcaccccgccccacaccacgagccatcaggcttacggtgtggggcggggtgctttatccctattgagaagagagctatactcctgcggtctgagtgagagtctccaagcgtgagatcagatgatcgagttgctcacggagtgccgatagttcgccctcggcacagcctgcatctcgcagcttgcaggagaagagcgaggggatatcttctgcctcctcacgcaaggccttcgcctgaggggtaagacagaggatcacctgccgactatcgaccgtaccacgcgtacgcgtgacgaagcccgccgcctcgagacgcttcagcagaggcgtgagcgtattcgtattcagccccagacgatctacgatgtgactgaggggcaccccgtcatgatcccacaggacgagcaagaccagatactgcggataggtcagccccagacggtcaagataaggctggtagaggcgtgtgatcagccggacgaccgtatagaagcggaagcacagctgatcctccagaaggagtgaaggtgaggacatacgatgtatatatcttcgaagaacgcgcaccccataggcaccgagggaggctactccttcggcacctatgggctacgccgtagattagagttgagagatagggcttagcacttagagcgctggcatagtgccttgagcgccccagtggaccacagagcccagaggaccagcagtggctggaagaagaggcgcaccaagcgcttcgcatccgtatcgagcccaaaggcgctgatcccctccgtgtactgatggatgttgccagggaagatcgccacgaagaagatcgctacgaccagcccgacccacacgcgctgacgatagagagctacgagggagagccctaagagcatctccacgacacccgaggccagcacgacgaagtccttgctcatcgtgagccagtcgggcacctgcgccacaaagtccgcacggcggaaggtcatgtggctgatccccgcatagaggaggaagagcccgaggaggatacgaaaggcgtgctgcgtcttgctcgtcgggagcgtagcgggcatcatacgagctcgagggttacgtcgatattgccgcgcgtcgcattggagtaggggcatacctgatgggcacgctccatagcctgctgtgctgcctcacgatcgataccatcgacctcgacacggagcttgacagcgaggccgaagcctccttcaccattctcgccgaggctgacctctgcggtgacagccgtcttcgcacggagcttgctctggcgcaggacgagcccaagggcgctatcgaagcaggcggcatagccagctgcaaagagttgctcggggttggtaccaccgccctgaccaccgagttccttgggcgagcgaagctgtacatcgagtacaccatcattacttactgcgtggccttcgcggcggccaccttcgacacgagccgaagtcgtgtacaaaaccttgattgacatagctgaatctatttaatgtaaagtactactgggagtaagagcatcagggtgctccttagagctacttagcgagaaagcaagaggtatcgagcagcttaataagaccgccccgctcattagagtcgattcctttcttgtagctgatgatctgtttccactccaaaggtaatacaaatcttacatacatcgcacacgatataatcaactcgaagggtaaagcctgcgagaatagcctaccctactcgccttcgtctcaccactgatctcccacgttcaagccacccaacagccctattcagagcattatctcccacccaactgagtcgcgtccacctaagccgcgcagtcccttcctatacagcttcacccctcacacacgctgagaaaaagcgccatcgcaatagtcaaataatagacttcgtatagtgcatttcccttatctacgtaggtagatttatcatccacgcgcgtaaactctaatatccacgtgcgtagattttagatctaggcacgtagatagaagtaatgctatactcgtccgtggctttacctctatgccgtggaagcttttccttcggtagcgtggaactttccctgtatagggatgccctcgcaaatcaatgaagacacaagagactcccgccccaatggcggtagctttccccagctaatgagactccgacgacggcacaggcgaaggcactccataccctcttctcggaggtatgacaccgaagctccaagaggagacacagcacaattccggcaattcttcaccgagtcatttggcaaatctttgattttcaatctacactatcacacagcgcattaagtatcaaaaaggaaaatcctgagtagtagtcacggcaaatcttccacgcttcatcaaggggtggaaggctcatttataagagctgagcatcgcccatcctcggagggaggagctggtaggcaagggaaaagacgagagaaaagcggggaaaagcaatgaatatttggttgataacattttgttacccacctttgcatcgcaaatcacctatgtaaggtaattccatttaccacacataggtcactcctaaaaacgataagaaatatgatgactcttgagataaagagtaaggtatctaagcagggccttcgcgccggcaagacgctttactacgcctaccccacgaagcgtgagaagctaagcatcgaccaagtgatggagcagatcagcagtatttgctcgctctcccgcatcgatgtggagtccgctctgcgtgccttcgccgaggtcgtatgtacgagcttcgagcaaggcgtcggcgtcgacctcggagagatgggtacactgatgcccttcgtccaaggcaagctgatgaacacccccgaggaggtcaccgaagcgaccctccagcctgcgaagatcatcatgcacccgaagaagaatatccgccaagcgctcggccgcatcacctgccagatcaagcgcgagccctcccaagactaagtaagaataagaaatagctataatggatctacgtttatcagtacgcaccaagcgtatagccctccttctcacagggctcgtggccagcacgtcgctgctctctgcccaagagaagctcaccctcgacgagtgccgcgaaatggccaagacccacagccgggtgctccagcagaaggacgccgagcgcgaagctgcccacgcccgcaagcaagaggtcttcacgaagttcttccctcaggtgacggctcgcggagcctacctgcatatgcagaaggaattccacctcatcgactgggacaagccactgggctccttcaacttcctcatccccgatcgtctgcgtcacctcggcaccgtcgacctgcgcaacgtatgggtagccaacgtcaccgccatccagcccatctacctcggtggtaagatcaccacgggctatcagatggcctcgctcgccgagcagctccaggacaacctccgtgagacagctgccacggagatcgagacgaaggtcgatgagacctattggcagatcatctccctcgacagcaagtcccgcctacttgaccagctcgtgaccctactgacgcagaccgtgcgcgacgtagatgcctccatcgcagctggtgtagcgacgaaggccgacggcctctccgtccgcacgaagctcagcgaagccgaggtcaagcgcagtcaggtacagaatggtctcgagctctcgaagatgctcttggctgacctctgcggtttggagtcctctgccgagatccatctggcagacgaaggacagatcgagcttgccctccctgctcctactgagcgcctgcaggcagaggaccttcccgccgccgtcgagcgccgcagcgaagtgcgctccctgcgtatggtcgacaccatctatagcaagcgcgtgcgtatggagacagcagagctcctgcctaaggtctacggcttcgccagctattcggctacgaaccccaatagctttaatggtccgaagaaggaatttggcggacagtattacctcggcgcgatgcttcaggtacccatctccgacctcttctcaggctccttccgccgtcgtcaggctaaggccgagcaccgcgtcaagcagctcgagctcgccgaagcccgcagtaagatcaccctgcagatgaagcaggcactccgcacagctgacgatgctcgccgtgcctaccagacggctctcaaggctgtcgagatggcgcgtgagaacatgcgctacgccgaagtcggctacaaggaaggcgtcatccccctgctcaactatactatggcgcagaccgcctggatgagcgcacaagacagcctcatcgacgcgcagatccgcgtcctcctctccgaaagcaaactgaagaatatccttgccctataaaacaatgagtacacaacccacccagcagcccacgcagaacgaggctgccaacacatcgtccaagaaaagtatcatcttcggagtcggtatcgtcgtcgtagctatggtcctcttagccctctctggcttcatcttcttcggtgagaaggaggatatcatcaccggccaagtagaggtcgatgaagtacgcatcgcgggcaaggtcccaggtcgtatcactgagttcctcgtcagcgaaggccagagcgtacatcgtggcgacacccttgtacgcatctattcgcccgaagtcctcgctaagctcgagcaggctcaggccgctaagtctgctgccgaagcccagagccagaaggcacaggctggcgctcgtaaggagcagaaggaaggtgcctacgagatgtggcagaaggctaaggctggtctcgaggtcgcagagaagagcttcgagcgcgtcgagcgcctctacaaggaaggcgtcctccccgcacagaagtacgacgaagccaccgctcagctcaacgcaatgcgcgctaccgaacgtgctgctcgcagccagtacgatatggcgatgaacggcgctcagcgtgaggacaagtgggctgctcaggccctcgtcgagcgcgctgcaggtgctatcaccgaggtcgacgcttacctcaaggagggtgcgctcatcgctcccgtcgacggtatcatctccgagatctaccctcatcagggcgagctcgtcggtacgggcgctcctattatgagcatctccgactaccgcgccgtgcgtgtcctcttcgccgtgcgcgaagacaagctcgccggcctgcgtcagggtagtaagctccacggcaccatcccagccctcggcggtaagaagatcgagctgactgtctcgaagatgaaggacatggggagctacgctacgtggaaggctacgaagcctcgcgaccagcacgacctgcgcaccttcgaagtaactgctcagcccacccagcctgtcgaaggtctgctggcgggtatgacgatcgtactggacaagggtcagctctaagatgtcaacccccaagacaggtctgggtgccgtactgaggcgcgaactccgctacctcacgacgcgccctatctacctcttcgccatcttcggggcaccgctcttggtcaccctcatgctcctctacatgatgggcggaggactcccgaccaatatgcccgtagcggtcgtggacgaagaccatacccctacctcgcgtgccctcacacgtagcctcgacgccttccagagctctgaggtagccctcgaggctgcctcgatgcccgaggcactcgaagcgatgcgccgtggggaggtctatgcgatcttccacatcccctccggcctacaggcaggtgcgggatcggcacgtcagcccaagctccactattataccaatagcgcctacctgatggcagggagcttcaccttccgagatatgaagatgctctccgagcttgcttcggccaaggtcggccttcagaccggccaagccaagggtaagacgatggaagagatcatggctaccgtgcagcccatcgtcgtgcgcaatgaggtgatgagtaatccttggctgaactattcggcctacctcaccacgacgatcctccctggtatcctgcagctgatgatcctactcctcacctcgtacagcattggtctcgagatcaagcgcggtacggcgagcgaatggcttcgtctggctaagggctcgatgagccgtgcgctcatcggcaagcttcttccgcagaccatcctcttcgtcctctcgggctggatcatccagggcatcctctacggctggatgggctatcccctgcagtcgggctgggcaccgatggcgcttgccatggtcttcctcgtgctggcagctcaggctctcggtatcttcttcatctcgctgatccccgtgctccgcatgggtatgagcctcggtagcctcctcgggatgctgtccttctcgatctcggggatgagtatccctgtgagctcgatgatcgcaccgatgcagacgctggcctatatcttccccctgcgctactacttccgcatagggatcaatcaggcgctcatcggggcacccttcgctgactcgctcccccaatatatcgggctactcgccttcatattcctgccgctcattatgctacctcgcttgaggaagtacctcctgaatgtcggctatatcgcttgatgcttctatgaatatcatccgatctctcagactccgcataagtgacctctggcaggtctgcctcagggagttccgtcatatcttcgccgacagcggggctatcctcttcttcctcgtcgtccccttcgcctatcccttcctctactccgccctctatgggagcgaagtcgtgcgagagacaccactggtcgtcatcgacaagagccatacggcacactcacgcgagttcattcgccgtgtcgatgcttcgcctgatgtacgcgtggtggcgcatgtcgcaggggagtcagaggcctaccgcctcatcggggaggagcgtgcctacggcatcttgattatccccgaggacttcgaccgaatgctgatgagcgggcgccaagcgcacgtcgacctgcatgcaaccttcgtctccgcactctactataaggccttctctctggcgacgaccgaggtagcgctgacgatggggcgcgaaatcgaagcggagcgccaccacggtccctccagcgaagccacacgcatctccgttcgccctatcgagagcgaatgggtcgtaccctacaacccgcaagggggcttccaaggcttcctcctgcctggggtgctggtgctcatcatccagcagacgctcctcatcggcatcgcgatgatgtcgggtacgcagcgtgagcgtggcgggctgagcacacctgtgcagtacgtcggtgggcactacgtcagcgtgatgcgcctcctcataggtcgtgcgatctgctacttcaccctctactcggtgacgtcgctcttcacgctggtcgtcgcaccctggctcttcggcctgccacagctgacggacttcacgacctatgtgctgctcttcctgccgatgattctggcgatgatcttcttctctctcggctgcagtctcctgacacgccaccgtgagaaggcgatgatcctctgggtcttcacctcggtgcccttcctcttcctcacggggctgtcgtggcctctgtcggctatccctgggccactgcgtgcgctgggctatctcatcccctcgacgccaggcgtccaagccttcgtcgccgtgagcagtatgggcgcgcagctctccgacatcctaccgcagtacatcacgctgtgggtacaggctctggtctacttcctgatcacgtccttcgcctacgctcgcgtgctgcgccgctcgtagctcacagctcagctgtatcaaatatgcgaggcccgaagcatctctgcttcgggcctcgtacgtttgatgccagcaagataaaactatttgcgctcaagcatcatacggtagtaccacttcggagtccatcccttcggagagaaaagcaggaagcagtagtcaagtgatttcctacgagtacgaataaaagttgctgacgaatagctgataagtttgatctacgtgcgtggctctaaaatctacgtacgtagtcttttggatttacgtacctggtctttaagactacgtgcatagacagaggaaatgcactacgggaagctccctttttcttcacgggaatgtagattttgctccgcagggcaagaagaatccccgtgatggggttcgcccccacgaaggactattcttgcatcataagccgataatccatatcttgcacgttgataatcacgggggtgcagtcgcacagacccgcattcccccccaagaatacaagcgactaagtatagtccatctctccatgcagcaaatcaccctctcccaagtcctacccgaggtcttccgtgagcgtaccgatctcgtctccgaggtctggcgacaggagctcagcctcgagcggggcaagcactatctcatagaagcctcttccggcgctggtaagtcgtccttctgtagcttcgtctacggctggcgtggcgactactcgggccgcatcgccttcgacggacaagatatccgcgcactctccgcctcagcctgggggcgcatccgacgtgagtccctgagcttccttttccaggatatgcgcctcttcggcgagctaacggcttgggacaacgtgtggatcaagaaccagctcacagggcacaaggaccgccagactatcgagggctacttcgaggcgctcggtatcgccgacaagctcaagagccccgcacgcctgctctccctcgggcagcagcagcgccttgccgctatccgctcgctctgtcagcccttcgacttcctcctcctcgacgagcccatcagccacctcgatgagtcgaacggccgcacactcgcagggctcatcaccgccgaagccaccgcccaaggcgcctccgtcatcgtcacctccgtaggcaagcacctaccgctggagtatcaccacacctaccagctatagccccatgaatagacttgtcatacgcctgctgagccgtcatatcagcccactgcagctcttcggcttcttcgtcgccaacctcatcggcatggcgatcatcctactcgggtgccagttctaccaagacgcgacgagcgtcctcggtgcgaaggaccgcttcatgaagggcgactacatcatcatcagcaagcaggtacgcggtgggctcttcggcaggaagaagaacaacagcttctccgccagcgaaatcgaagagctatcgaagcaagactttgccctgcgtgtcgggcgcttcctcccctcgaagttccgtgtgtcggcgggcctgacactcggcatcgggatgtcgacgtatatgttcttcgaagccgtacccgaagagttcctcgacgtgaaggccgaggactggaagtacgacccgaatagcgatgaagtgccgatcatcatcccacgcaactacctcgggctgtacaactctgccttcgcacagagccaaggccttccgcttctctccgaggcgacgatgagtagccttccccttcagctcgacctctcgggtgctggcgaagaggtccagctacgtggccgtatcgtaggcttctccaaccgcctcaatacgctactcgtccccctacccttcctcgaggcgatgaacgaacgcttggcacctggtgccgaagccccctcgacacgcctcattgtcgaggtcaagagcccttccgatccagccatcacactctacctgcgcgaccaccactatgagagcgaaggcgagcgcctggcgtcaggcgaatcaatgtacctcctgcgactcctcgcggggcttgtcttagctatcggggtactcatctccgccctctcgatctatctgcttctcctctcgatataccttctcctgcagaagaatacgcgacagatcgaggatctcctactgctcggctacacgcgtagtgccgtcatccgcccctacatcgcactgacgctcctcgtacagtgcgctgtcctcggccttagcctcgtcgctgtggcctacgcccgtggctactatatcgaggctgctcagcgcctactctctgacgaagtgagcggagggcttggcacgaccgccctcatcggtgtcggcatcttcctcatcacggcactcatcaatacgctatccatccgccacaaggtgcacagcctacgcctcttcgctaaggcataggctccactaagcatcacaaaagcataagcccgtgctccccagatgtgggagtacgggcttatgcttttatcggcttttcagctgactacggcgaggggcgattagccgagtgccttacgcagctcatcgagctgctgacggatctgccgtaggcggagcagcgtgtcggcgcgcgactcgagggaggactgacggacgcgaagctgggcattcgccccctcgatcgtcatccccttctctcgcaggaggagctgtatggtgcgtagcgtctcgatatcccgctcggtgtactgccgcacgcccttaggcgagatgtgaggcgatacctgcgggaagaccgtctcccagtagcggacggtcgagacgggctcaccaagctggtgcgccacctccttgatgcggtagaagagtcgcttagccatagctgcgagagcttacttagctgcggggatgtaggtctcgaggagcttgaccttgcccacgggtgtgagggtgagcgaaggattggaagcagggacgagtacgctctgaccctgatgcagctcgacgaccgtgccgtcagcatccgtcagacgtacgccaccctccatacagatgtagatgacgaagctatccagcttagaccagtcacgagcaagtggcgcatcgaggtccaggaggttcgtctcgaagtagcggcaagataccagctcgacgggagcatctacctgaggcgtgtaagccgtgcggtagtcgtcctcgaggtgatagtcgatggcgtccttcgccagctcggtgtgaagctcacgcttgttgcctgcggcatccgtacgatcgtagtcgtagatacggtaggtgatattggaggtctgctggatctcagcgatgaagcagcctgcaccgatagcgtggacacgacctgcggggaggaagaagacgtcaccagcattcacttcgtattcggccagtgcctcgacgatggtaccttcttcgatacggcgcacgtagtcctcgggcgaagactgcacggcgaagccactatagagcttggcccctggggtcgcattgatgacgtaccacatctcggtcttcccgaaggaattgtgacgcttgagaccgagggcatcatcgggatgcacctggatagagaggtagtcgcgggcatcgatgaacttgatgagcagggggaagcgacggccaaagcgctcgaggacgctcttaccgacgagctcttcgccgtaggtatggatcagttcgtcgaggttcttcccagcgagcgggccagctgcgacgacggagtagttgtcgtcgacgtgagagatttcccagctctcaccgaccttcttatcgtcaggagtaaggcctttgaatgggcggatagcactgccgccccagatgacttccttcaagagaggctcgaaggtcaggggatatagcttattgatagacataatgggatgtatgatatcgtggagatatatgtggattgtcggatgacggtgcaaaggtagtcattatagcctctacaccctatttatgcataggtacaaagagaagaagcgagcgcttagaccgcagggaggttcatccccgtgatgcggcgatagaggtcgagggcgtagatatccgtcatccccgagatatagtccagcgtgctctggatgcgtccgtacatcgtgggctgtcccatctcatactggctacttacgcgactgaggagcgtgcggctgtactggtagtcggggtgaatctgtgcctcaaggagctggtcgaggagggcggtgaagatacgatgccctgcgagctcgacgtcgacgacctcacgggcccgatagatgcgggcataggccgtctggctacacgcctcgtaggccgccttcgtgcgtggctcgaggtgatggatgaggctaccagagaaggtccccgcgaggatctcccgctcagcatcgaggaagatacctgcggcctcctcgaccaagagattgatgaccttggagcgcaggtaagccgtctgctcgttggggtcggtgatatgccgaaggccctgctgcacctcccgcagctcctcctcggagaagaaggccgagagcaacccctgtgcctccccacgactcaggatgtggagcttcgcggcatcctcgatgtccataatctgatagcatatatcgtctgcagcctccacgaggtagaccagtggatggcgggcatagctcagtgctgaggcggtgcgtcgctcgaggcccagctctgtggcgacctctttcatcgtctcctcttctgtggcgaagaagccgaacttactcttccctcctgccaagagactgctatagggatacttcacgatgctcgccactgtgctatacgtcagggcaaagcccccaggacggcgaccacggaactgatgtgtcaggaggcggaaggcattcgcattcccctcgaagtagaggaagtcctcccagcgtccaccctcggcacgtaccagaggctcccagcgcttccccgggccttcgccgaagtaagcgctgatcgcacgctctccgctgtgtccgaaggggggattccccatatcgtgcgccagacacgcagcgctgacgatggcactgatccccgagcggaagggcgtctcacggtcggtgggatagcgctcggagagcacctccccgacgatgttgcccagcgatcgcccgaggcagctcacctcgaggctatgcgtcaggcggttgtgcacgaagatgttcccaggcagagggaagacctgcgtcttattctgtaggcggcggaaggcaggcgagaagactaagcggtcatagtcccgctcgaagtcgcttcgtgcccagccccgcgactgggggcgctctgcgcggtctgcacccagacggcggtcagagaggagttgggtccaatgcattggcttaggatcgagagcgagcagggagactccccgctcgtagtaaggagatgaatgatatcacaaaggtagtgcatctaagcgctttacccctcatctccccccgagatcaggatacacgccccgaaggaggtgatgtgaaccaatataggtcggtgcgctgacctatattgagattgttgccgcgagtcctgttccctatttagagtgctaaggcatcgtgcgcccagctccccgatacacctctccgaagtgaccgagcaagcccttcgccttatcacatatattcctcttatcctgcgaagggaaaagtgtccttctcgtgaaggaaaaagcgccttcacgtagtggtttttcagtatctatgcacgtagtcttaaagaccaggtacgtaaatccaaatgtccacgtacgtagatattagagccacgtacgtagcccaaacttatttgccactcgtccacaacttttatccctacgcggagcaacagtctcatattggtcgagaagcgaagctatataggtcgatatatgtgacctatattggttcgagcagtgacctatataggttcgagcagtgacctatataggtcgctatccccctcctccagagttcagagcagcgaagcgatatacttctggatgtcaattactaacggagcacctctactctcccattctcccgctctactctttggcagagcgacatcctttgctcccaggataataggaggagtgaaatgcccgtttgagctaacagcagagtgatcacacgtagcggcctcttttgtggatatatccctatatttgcagtatatagatgcccccaattaactacacatcatagcgacttatgaaacgaatcaaacattaccttctcctcttagcagtccttgccctcgggctctccagctgtagcaaggaccaagcttaccagtatgccctgccggctgacgcctactcggtatgctccttcgacctcaagtctatggccaagaaagccggcgtcgccaacagtaaggatggcgagctacagaagcatctcaccgagatgctcagcgacagcgaggaggccgaagcctactacaaggagctcatccaaaaccccagcaagagcggtgccgacctcaagagccccgtcttcttcttctccaatgaaaaggtcagcctcggctacctcctgcgtgtcgatgacaaggccaagctcgaggcctgcgtgaacaagctccgtaagctccgcaacaaggatgctgcagctctcaaggccgaggacggcatcttcttcgatatcgacgaagactccaccgagcccgaagaagtcgaatacgatgagagtgagtacgacaccatcgaagagaccagcgacacgacagcccaccagccctcgatctctacctaccacgtctctgggaatgtcacggtctacgctttcaatgacaaggccttcatctccctcaacaccagcgagtcgaccatcgaagagacgaagcagctcgctaagcagtacctcagccagaccaaggacaagagctatgtagctaccccagccttccgtgacctcgaggaccaaaagggcgatatccgcggtgtcctctcgatgacgaagttcttggaatccagctatggcaaatcaatgactgagaacattgtaggcctttcggatgccaccaacttcgatggcatcgatatgaagaagtgctatatgctctactcggtctccttcgagacgggcgaagtcgtgggtacgatgacctatggtagcgaagacaaggagatcctcaagaagctcaagaagctcgccgaggaagtctctcccaagtccgtacaggatgacctcgtgaagctcctccccaaggatagctatatgaccgctgctgctacaatcagcgcacagaagctcatcgagcactacagcaagctccctggtctcagggaagcactctcgaacctcaaggaggaaggcgtcgatatcgaagctatcgctcccaccctcggagaggagttcgccttcacctgcccccacatcaatgcggagcaggctgacttcggcctcgtagtctacctcaagacgaaggatgctacgctcgtagatatgctctatcagcaggctgagaaggagcactctggcagatacgtcaaggatggtggagaccaccgctatcgcatagcagaaggttccttcttcttcggctaccaagacggtgtgacctatctggtctacggcggtatgggaagagaacagctcttcaagacctcgggtgagaacttcacgaagcacagcgaatacagctcgctcaagaagagcaacagcttctgctacatcgacctgaagaagctcctgacgacggctcctacctctgatctgctccagatgttcatcggcgagaaggccaaggccttccacgtcctccagtccctgagcttcacggccaccaatatcgatggtaagatgagcctgaagatcgactcgaaggagaactcgctgaagacgctcgcagacctcttcgtcgccctgcgataatccctcacgatcagcgctctgcaccgagcgtccccccttacgcagtgccccgcccctcagactgaagagcggggcactgcgcttttgacggagagccacatcagcgcatccagctgatttgcactacctttacgcacataggtcaatccccaactatcccccttatatgacacgaatcaaacattaccttctcctcttagcagtccttgccctcgggctctccagctgtagcaaggaccaagcttaccagtatgccctgccggctgatgccttctcggtatgctccatcgacctcaagtctatggccaagaaagccggcgtcgccaacagtaagtatggcgagctacagaagcatctcaccgagatgctcagcgacagcgaggaggccgaagcctactacaaggagctcatccaaaaccccagcaagagcggtgtcgacctcaagagccccgtcttcctcttctccaacgaaaaggtcagcctcggctacctcctgcgtgtcgatgacaagagcaagctcgaggcctgcgtgaacaagctccgtaagctccgcaacaaggatgctgcagcactcaaggccgaggacggcatcttcttcgatatcgacgaggactccaccgagcccgaagatgtcaaattagatgagttcgatgagagtgagtacgacgtcgtcgaagcgaccagcgacacgacagcccaccagccctcgatctctacctatcacgtcccagggaatgtcaagctctacgccttcaatgacaaggccttcatctccctcaacaccagcgagtcgaccatcgaagagacgaagcagctcgctaagcagtacctcagccagaccaaggacaagagctatgtagctaccccagccttccgtgacctcgaggatcagaagggcgatatccgcggtgtcctctcaatgacgaagttcttggaatccagctatggcaaatcaatgactgagaacattgtaggcctttcggatgccaccaacttcgatggcatcgatatggagaagtgctacatgctctactcggtctccttcgagacgggcgaagtcgtgggtatgatgacctatggtagcgaagacaaggagatcctcaagaagctcaagaagctcgccgaggaactctctcccaagtccgtacaggatgacctcgtgaagttcctccccaaggatagctatatgaccgctgcagcctcgctcagcgtgcagaagctcatcgagcactacagcaagctccctgacttcaagaaaacactctcggagctcaaggaggaaggcgtcgacatcgaagctatcgtccccaccctcggagaagagattgccttcaccctcccccacatcaatgcggagcaggcggaattcggcctcgtaggctacctcaagacgaaggatgccacgctcgtggatatgctctaccagcaggctgagaaggagcactctggcagatatgccaaggacggtggagaccaccgctatcgcatagaagaaggccccttcttcttcggcttccaagatggtgtgacctatctggcctacggtggtatgggaagagaacagctcttcaagacctcgggtgagaacttcacgaagcacagcgactacagctcgctcaagaagagcaacagcttctgctacatcgacctgaagaagctcctgacgacggctcctaccgctgatctgctccggatgttcatcggcgagaaggctaaggccttccgcgtcctccagtccctgagcttcacgaccaccaatctcaatggtaagatgagcctgaagatcgactcgaaggagaactcgctaaagacactcgcagacctcttcgccgccctgcgataatccctcacgatcagcgctctgcaccgagcgtccccccttacgcaatgccccgcccctcagactgaggagcggggcactgcacttttgacggggagccaccatcgcatccatctgatttgcactacctttacgcacagaggtcaatccccaactatcccccttatatgacacgaatcaagtactacctcttcctcttagcagtccttgccctcgggctctccagctgtagcaaggaccaagagtatctgaatgccctaccagccgatgcccatctggtatgcgccttcgagctggagcctaccctaaggaaatcaggcctcttagaggccaatatccaattgcgtcagcgtatcacccgagcactgacgggtcctatcaactccaatggcgatatcaagggcctcatccagggcatcaagcaatggggagtcagtatcaaaagccccgtctatgcattcgcgaatgagaagatcgatgtgggctacctcctgcgtgtcgacaatgtggagaagctcaagaagacctccagggatgtcctcaagctcttcggcaaggatccagcctcagtcaagtcagaggacggtgtcttcatctatatcgacgaggagtcgagagatccaggggaagtcgggtgctaccacaccgaggacggcttctctactgaggggggtgcagcagttgacttcactgaagactccatagcccgacaagagtgcgagggggaagtgagccttcccgataccatcgcctatcatcacccaggagacgtctccatcgtagccttcaacgacaaggcactcatcacgctctttaccactaaggccaccatcgaggaagcgaagcagctcgccaagcgctacctcagccagaagagggggcagagctatgcagctacccctgccttccaagatatggagaagcagaagggcgacatccgtggtgtcctatccttgaggccgctcgcaagtgacagctatccctttgagctgttcaccgagcagggtaagctcagcctccccttgaagatcggtggcatcgatctgaagatgtgccacctactcttcgccttctccttcgagctgggggagctcaagggcagtgtgacctatggcagcgaagacggagtgactctggagaagctgcggaaactcaccagcgagatctaccccacgacgatacaggaggggctcatcaagtacctccccaaggatagctacatcacggcagcagcagccttcagtgctcggaagctcctcgagcagtaccgagaggatcccagttaccaggagctccttagcgagctcaaggctaacagcttcgaccttgaggctatcgcccccaccctcggagatgagatcgccttctccttcccccgcattgcagaggactggacggacccacagtatggcttcgtcgtctacctcaagaccaaggacgccacgctcgtcgatgctctctaccagcaggcagagaaaaagatccctggccgacacaccgctgagggtgcccaccgctatttcgtagctgagggcccattcgtctacggctaccaaaacggggtgagctacttcgcctacggcttgatgggcaaggacgacctctttaagagtggaggtgcagacttcaccaggcacaagtcatatcacacgctcaaggagacgaatagcttcgcctacatcgacctgaagaagttcgtcaccaaccctgccaccgcctctatcagccaattcatcctcggtgataaagcgagcctccttgagtcactcaccttcaccacctctggctccgagctccagatgagcctcaagcttagctcgacggacaatgtgctgaatacgctcctcgacgccttcctccccacggagtagagcctgattcttagcgctctgcaccgagcgtccccccttacgcagtgccccacccctcagattgaggagcggggcactgcgcatttagcgggcactcatccgccagatagtcggaatagaatgcgtacctttgtgccactgtgcaagggatttgcacgacgtacattccatcatttactccctcccgcatgcagcaagatacccctacattttcgccgaagcgatggggctggttcggcctgagccctctcatcgtcttcctctccgtctatctactgacctctatttgtgtaggggacttctataagatgcccatcacggtggccttcaccgtagcctcgatctatgccgtcgctatcacccgcggcatcaagctcgaggagcgtatccgccagtactcacgtggtgcctccgacccgaatatcctcctgatgatctggatcttcgtcttggctggtgccttcgctacaggtgctaagagtatgggtgccattgacgcgaccgtgaacctcatcctctcgctcctcccctcctcgctcctcctcccaggactcttcatcgcggcgtgcttcatctccctctccatcggcacaagtgtcggcacggtcatcgccctcgtacccatcgccctcgggctcggtgagagcctcgggctatcaaatgcctatgtagctgccgtcgtcacagggggcgccttcttcggcgacaacctctcgttcatctccgacacgaccatcgcagcgacccgcacacagggctgtagcatgaaggataagttccgtgcgaacatcgctatcgtcctaccagccgccatcatcgctctcgtcctctacttcgtcgtcgggctggagctccctgccgtacgtccctcgggcgaaggctccttcctcctcaccctcccctacctccttgtcctcgtggcggccgtcgctgggatgaacgtgctgggtgtcctcaccctcggcatcatcgcctgcggtgccgtcgggctgggtacaggtacgctacccgcctgggactggatagccgctctcggcagtggtatcacgggcatgggcgagctgatcatcgtgacgctgatggcaggcggtatgctcgagctcatccgctacaacggcggtatcgattacctcctcaggcacctcacgcggggcatcagtggcaagcgtggggctgagctgactatcgctatcctcgtctctgtggccaacctctgcacagcaaacaatacgatcgctatcctcaccacgggcaaggtatcccgtgagatcacgaagcagtacggcctcgatccgcgcaagacagcgagtatccttgacaccttctcctgcttcgtgcaggggctcatcccctatggtgcacagctcctccttgcttcgaagctcgcaggtgtgtcgcctatggacatcgtccccaacctctactatcccttcatcatgggtggctgtgcactgctctcgatcctcctgcgcttcccacgccgctactcccgctgacccgtcatgcctaccatcgagctatatcctataccttggggacaagagcccccagcacatctgcgacagatctatgaggaagccttccctcccgaagagcgtcgtccgtggacacagctcttcggcccagagcgctgcgaacatatagctcagctcatcctctccgatgacgaggtcgtgggcttcgtcgtaggctgggagctaccttcatcacattactttgagtaccttgtcattgatcccaatcgaagaggacaaggccttggtactaaagtactccagctgctgggacagctctacgatgacgaatatcccatcgtcctcgaagccgaaccagcgggctactcaccgatggcggagcgacgcttagccttctatgcacgctttggactcaccgtacagcccttcgactaccgccagccaccctatggagcagacctcccctgggtcgatctacacttactctctaatcgctcactgcaggaagtagacttcctccgcatccagcaggagatccaccgccaagtctaccgtatctcttcagacaagtaatgtctatcaaacaagtaaagccctatgaataacttcaccttccgcaatcccaccaagctcgtcttcggcaaagacagcatcctggagcttcctaagctccttccctcagatgccaagatcctcctcaccttcggcggaggtagtgtcaagcgtaatggtgtctacgaagctgtcatcagtcagctcagtggcttccagaccgtagagttctggggcatcgaacctaaccccaaggtagagaccctgcgtaaggctatcgcccttgggaagcaggagggagtcaccttcgtcctcgcagtgggcggagggagtgtcctcgatgccagcaagcttatcgtcaatgcgatcccctcggagcgtgacgcttgggatctcgtactacatggcgctgaccgaagcgtccagacccttcctcttggcaccgtgctgacgatccccgctacgggctcagagatgaaccgtggagccgtgatctccagcgaagcgacacatgagaagttcggcttctacaacgaatatcccctattctcgatcctcgatccgagctatacctactccctacccgactaccagatagcgtgtggtatcgccgatagcttcatccacgtcgtagagcagtacctcacccgtgtcggggagagccctctcatggatcgctgggcagaaggcattctactcaccctcatcgaggaggcagacaagatcaaggctcagcctgcagactacgatgcacgtgccaccttcatgctctcagcaacgatggcactcaatggcttcatctctatgggcgtgacacaagactgggcgacccatcgcatagggcatgagatcacagctctcacggggctaacgcatggtcatacactagtcatcgtcctacccgccctcctcagagagcaggccaacaaggggaagcatgccaagctcctgcagtatgcctcccgtatctggggtcttaccgagggtagtgaggacgaacgcatcactcaggccatcgacaagacggaagcattcttccgttcgcttggtctcgagacgcgtctcgctgagcgtggcttcggagatgacctacgcgaagaggtcgtccgacgcttccgtgagcgtggcaccctcctcggtgaagatcaagacatcgaccacgaagcagtagcacgcatccttgctcgctgctaatcccccccttatcatacacaaaacctcctctatgactcttgccatccttgccgtctcaccccaagggatccagacggctaagctaatcctatccaactatcccaatgctcgcctcttctccactcatcctggggaaggggtcgagcacattgatcatatccagtcgttcgtagccgagcagttcaccgcattcgaagggtggatcttcatcggtgctatgggtatctgtgtgcgtagcatcgctccactgatcgggcacaagtacaccgatcctgcggtgatcaacatcgacagcacagggcgccacgtcgtctccgtcctatcgggacacatcggcggtgccaacgagctgacgcgtgacctcgccgccctcctcggtgccgagcccgtcatcagcacgcagactgacaatacaggcctgtgggctctggacctcttctctcgccgctatagctgggtgacgaaggccagctccgaggggctgaatcgccccatcgctctctataccaatagggagaagactgcactcctcctcgaagtgcaggacaagggaacgagcgagctggagcgtaccaaggccgaccatgtcgacgtctattactcgcgtgaggagcttatcccccgtctctccgagtacgcgctgctcctcgtcgtctcctaccgagcactggagatcgacctactccccaccgtacacttcatcccgcccgtactgagcctcggcctcggctgccgctatcagtgcgaccccaaggatatcgtcagctatatcctcggtgaagtacgccgtcacggcttcttccccgaggccatccatcatctggcgaccatcgacctcaagaaggacgagccgctcctgcatgagcttgctgcgaccctccggctcacacccgagatctacaccgcagccgacctcgccgatgtagaggtcgctaatccctcgaagaaggtccacgaggtgacgggcgtatggggcgtggctgagagcacggcacgctatgctgcctccctcggtagcctcgtgctggagaagcagaagggtatgctccacaatggtaatgacttcaccttcgctctggctgtagagcgcagtgcagagcgccgcggacatattgagatcgtcggtgcaggtcctggtgaccccgacctcatctccatccgtggtcgtcagtggctggagatcgctgacctcatcctctatgcaggaagcctcgtcccccgtgctctcacgctatgcgctaagccaggtgcgacggtgcgtagctcggctgacatgaacctcgaggagcagttcgctctgatgaaggagttctatgacaagggcctcatcgtcgcccgccttcacaccggtgatccctgtatctacggggcgatccaggagcagatggccttcttcgatgcctatgggatgagctaccatatcaccccagggatctcgtccttccaggcggcagctgcagagctccgctcgcagttcaccatccccgagaagacgcagaccatcatcttgacgcgtggcgaaggccgcacgaagatgcccgagacggagcagcttcacctcttggctcgctcacagagcacgatgtgtatcttcctcagtgcaggtatcgtcgacgacgtacagcgccagctccttgagcactatcccgaggatacccccgtcgcagcctgctaccacctgacgtggcctgaccagcgtatctaccgtggcgtactgcgtgacctcgcacagatcgtccacgagaacaagctcaccctgacgacgatgatcgtcgtcggcgaagccatcgacaatcgcaaggggctctctcgcctctatgccgatgagttcaagcacctcttccgcaagtagtctctcgcggtacccaagagagtagccacctagagcaaaaggtcacggcctccatccctactcggtagggatggaggccgtgacctttcatttggggagcgtatatctgcttagatgaggctgtagccgagagtcctgccctctatttagagtgctaaggcatcgtgcgcccagctccccgatgtacctctccgaagtgatacgcaagcccttcgccttatcgcgcgtattcctcttatccagcgaaggaaaaagcattgttctcgtgaagaaaaaagcaccttcccgtagtggttttcctctgtctatgtacgtagtcctaaagacgaggcacgcaaatccaaatatccacgtacgtagatattagagccacgtacgtagcccaaacttatttgccactcgtccacaacttttatccctacgcggagcaacaaactaatagaggtcacttcataaagctatatagaaagcagcccaaagctatatagctttgggctgcttcctatatagttctacctacgcacccatatacctatatatgggatcattgcgcaaggctatctcttagatatcgaaggtcgccgagagatagaggcgacgaggacggttaggcccatagatgtagtccgaagctcgtccaggacccatatcggtatccttctgataggcattgaggaagttctgcacaccagcatccagcgtgagcttcaccagcgaagtgaggctgaaagcatagcttacacggaagtcaagatcaacaaagggctttgccttgtataggtaagctgaccctgcattctgcccacggtagcgcgtcccatcacgcacgacatcgaagtgtccctgagcatccagctcattagcttggaggttgagatcccctactccttcgtaggccgtatggggcacattcatcgagcccgtataggtgcccgagaggacgaagctcagagcagaggtaggacgaagcgtagcggtcagatagccgtagagattaggggtacgctcatagtcacgcgtcgtgaccttggcctgcgtggggttcccatcatctgcatcgaagagcaccttctcctgcccgtagaggctacgctgtagggtcacaccgccctgcaggtcgaagaggcgctggtatgccagacgagcctcgaagctaaggccatagaccttgctcatcccgtcacgagcgttgatgatcgtgatgaccttgcgccccgtcttggggtcgaggacaccatcctcgttgtctggagtgaacttgtctcggatccaggtagcgaagccttcacccatgaggttgagctgccagcccttccccagcgtggtgtaccagtcgaaggaagcgctgaggctacgagagcgctcttccttcaggtccttcgctaggacacgctccttgggttcgccacccgccagcgtgacgtgcatctcctcatcgaagaactgaggagcacggaagccttcgctgtaagagaggcgcagactgaggtccttcgtgggattgaagcgcacgttcgctctggggctgaagatgaggagcggatcaatgctcttctgcccaccctgcgtcagacgaacatagtcgaagcggccaccaaggaggaaattccaacggtcggtcgaatactccagctggtcgtactgcgaccaagtcgtcgtcacttgatcgatgccgtgagcacggtagccactcttatcgttgagcgtcgagtaagcaccctcagcacctaccgtcagggtcagcgccttggggaacttgtggacataggtaccgcccccctggaagtcaaagcccttggtctcgccataggctgtcagcgccttgagggcatcgtcataggccttctgatactcctcggcctgcttcttctcctcgtcggtgccttgggcattaccacgagggaggttgatcaggggcttcaggagctcatcggcgtagttgcccccaccatagtagctcttacgcaggaccttctgccccgaagcatagaggctaaagctgtcgttgccctcagcagtcgtctggtcgaagcgtaggcttcccccatcgacgaagtgctggagatactcagcgatacgagcttggaagggtgcttcacttaggcgatcaccaccacgacgatactcgtgcatggagcggtattcagccgtcagcttgccatagatgcccgtcttgtagtaggcacggaagccgagagctctattcttcagttcgggaatatcggtgaagtcatccccatcgacatccacgatcccacgagaggaatgctgaccgaagatcatcgcagcagcacggcggtcttcgctgaccagcgaaccattgaacgaggtcgtaggcatcagcgaagtgtatgcccccttgttctgctggaaggaagtatagctctggcgaaggctagcggtattgcgcagaggctctctcgtgatcacattgatcaccccaccgacggcattagcaccgaagagggctgatccacccccacgtaccacctcgacacgctcgatcatagaggcagggatctgctccagaccataaacgccagcaagcgaactgaagataggacggctatcgatgaggatctgagaataagccccttcaagcccgttgatacgcacttggttgaagccacagttctgacagttgtcctcgatgcgaagacctggctggaagcggagaccttggctgaggttctccgaattggtcttcttgaagatctcctgcgagaggacggtgacaaggctcggtgcatgacggcgaagcgtctcctgacgattagccgagacgacgaccccatcaaggtcgatactctgctgctggagatagaggtctaggtggcgactatgcccagcctcaatcccgacacggctctcctccaccccatagcctacgagacgggcttggatggtataagagcccggagcaaggccttggatcgagaaggctccatggacatcggtagtcgtaccgatcgtggtccccttgatgaggacttggacattgggaagggcttcgtgtgtcgaagcgtcaacgacggtgcccacgatacttcccgtagtcgctgagtgctgtgcctgagcttgcccaagggccacaaggacaaggctcagcagtagtgccatacggcaaataatactcttcatgtatactataagttgattatacgaatcggaccaacaacagagcaagacgtagtcctcccagcgcaactcacccgtcaaaggatccagggaaaggggctacatgtcgagcggagagagaggctttctcgagagcgattcctcggtagagcgagggatcttgttctgtttaggtctacacaaagttaaacacagaaagcacaactatggatcacctacccacaaaatacctattgctggggatagactgatacccgctaataagctaataaataggtcacggcctccatctctaccgagtagagatggaggccgtgagcttttattattaaggagtagtccttagtccttcttgcgctgagcgatagagcccgaagacttgtcgtagcgattggagcgaccgccgaagaagaagggcaggatgaccgtgaagaccaagagagcacccagcacgacgaggcccgtgatccaggccttggtcaagtcggcagaggtcacggggatctcgacaccccacagcccaaggagatagaaggccagcgtggccaggagaagcagcgtgatgatgccgccaaagatgtacttcataagtcggatctgtctgaggggttagagttgatcgagaagctcttgcttcttcttgtcgtagtcttcctgagtgatgacgccctcgctgaggaggagcttgagctgcgtgaggcgacgaagcagggggtcatcagagccgaggtcctcggtcttcacctgaggagcctcgggtgcaggagttgcaggagcaggctcttcgccattcacggtctgagtgagcttcttacccagctccagaccgagccccatctgcaggcctgcggcaccgataccaccttcgttacgggcagcatcacgcagagcctcgagacgctgcatctcttcgtagctgatacccgcttcactggcagcaaggctctctgccgtgatgtctgccacgcgagcgatacgctggctcgtagcctgatcatagtgggtacctgtgatacgcacatccgtcagctcaatacccagctcgttgaggatgggtgacatcgtagattggagttcgcgagagatctcgggcaggcggccgtcgatctcagtgatgggatactgatgcgcatggaggatagaggcgatctgctggtaggcacgctcgacgatgacactctggagtgcacttacttcatagttagcgacaccagcaccgatgaactgcgtgaagaagtggctgggatcagcgacacggaaggcatagaccccatgcacaccgagctctacaggcaccttgtagatcggatcgacgatgaggataggtgtagccgttccccaggggatattgacgatctgcgtggtacggaagaagtagatctggagcttatgctcgctctcaaagccttggcgcaaacgtaccagcgtagtgaagaagggatggttatctgtcttcagctggaaggaacctgcctcggtcaagacctcggcgaccttgccttcgtagacgaggagtgcaccctgaccaggagcaacgatgagcttactgccatccttgatttcatcaagtgaggaggggaagcgataccagagatcgcctgggcgtggatcagcccactggatgacctgcgccagctgccccttgaaaacattgaatagacccatagaaagtattgtatgtgtggggttagagttatcgtgttattggcttgtactattcttcgccctcgacgacctcgtggaagtccgtgccttccttgagcttaccatcgttggttagcacccaggccttagaggagctcgccacgacatagcctccagagaagcgagtagtcttcagcgtataagcgaagtcatcctcttcatcagaatagctccacagcaccttgcccgtctgggcatccaggcatcggaggatccttgtcgcatcagaggctgccgtgggcttgaaagaaatgaggactcggtcagctgcctcatgaaggactgcaggagagaagtagtaagcccctggggtaaagtcttcgtagccctgcaggcgtgagcgctcagctgtatagggtaagacgaagaccttgcgatagggcgaggcatcagtgaagatcccagagccaccatagtccttctgccagccgaagtctggctcatcgtacggataaccgacctgctcaagcgtacggtagcgcaccagctggatctgctgatcctcatagtcagtagtctgacgtgagaaagtaaagtgcgtgccgaccttaggagcagggagcttctccagatagcccttataggccatcttctcgccatagagcttattggggataggatagtagacaaagctcttccccagattcgtcatgaccttcaggccatcgccattgtccctatagacgaactctaccgtcgcaaagccctcgctgaactcagctaccttatagtcctcgccatggatctccttcatatcgagcgtcgagggatcgatacgatagaggtgcttcttattgaggataaggtaaactgacccatctccgaactgacgcacgcccgtcacatcgacgcttcccttcagatcagggagctggatatccttgaggaccttcttagtctctccatcatagaggcgcacaaagccttgggcattctttgagctcgtattcatctgataagcagagccacagaccaccacgacggggcgccctgcggtactggcaaagagctcgatgggctccaagtcataggacatacgctccttcagagtaccggtatagccgtagccaccttgtgaggccgcgatacgctcggccacacggtccatcgagcgactggaggtgagattaccgatgatgaccaggaggaagaatgcaaacgatgcccctcctgcgatgaggaggctgcgcttgggatgtgctgagaactgcgactggatgaaggagaagggattcgagttatcgggtaccgtctcatgcttgtgatggatggtgatatcatctgagtcgaggaagaactccgtcgagcagctgtcacagcggtagtgatcctcgcggatcagtgtggcgcgcgtgctaccacactgggggcatttcagagctttgatgtgcttgggcatactgggtatgagctatgcgaagagctataaatatgtgtaagttacgaacgtgataaagtcctgtattcgtatggggcaaagcctctacaaggacaaatttaagtaagaaatacgagtagttaagagcggccttcgatgagcttacgataatccgtgctgctcacgagcttaccctcgttggagatgacgtaggacgaacggttgttcaccacgacatagccacccgcgaagcgtgatgcgacggacccaccatggagattattttcatcatcggagtagctccacagcaccttcccggtctgggcatccaagcatcggagcatttgcttagcgtcatcggctgctgtgggcttgaaggtgatgaggatctggtcttccgacgtatcaaggaccccaggcgagaagtaataagctccaggagtcagatcttcatacccctgcagacgcgcacgcttctcactggtggagctgatcaaaaagtcctcaccatcccagctccgccattggaaccttgggtattcgcaaggatagccgtcctgctcgagtctacgatagcgtatgagctggagctgcttattgggatagtctgaggactcaagcgaaaaggagaagtgtgtcgccaccttaggagctgggagtggctccagaggagccgcataagcgtccttctccaagtagagcttatccgcaatgggatagtagacgaagctctcacccagatttgtcttgaccttcaaggcatccccaaactgagagtaataaaataccacctttgcaaatccctgactaagctcagggcgcttatagtcctcaccatggacctccgtcatatcgagcgttgagggatcgagcctatagaggtgagcctcattgaagacaatgtaaaaagccccatccccaaatcggcgcatatccatattctggattcgccccttcacgtcaaggagctcaatcttcttaaccagcttttgagtctctccatcaaagaaggacacgaagcccttagcatcatcgacattgcttgagcttgtcgggcgagcagagccaaagatcacgacgatcggacgtcccgctgtagtggtaaaggtaccgagctcctcaatactgtaggacatccccgactcaccgctacccatccccgagctcccttctcgggagcttcccagggtaataagccccatgataatgagcgagaagaagaccgtcaccgcaaggatagcgaggggtagacgcttgaggcgtgccgtggcagcactcttatggaagggctccgtctcgatcttgtgatggatggtgatatcatccgagtcgagatagtactccgtcgagcagctgtcgcagcggtagtgatcctcgcgaagctgtgtggcacgcgtgctaccacactgcggacatttgatcgttttgatatgcttgggcatcctgtatatgagctatgctaagaggtatgtttagttgagagggcaaatactatgtaaggggagcggactggagttcgtgttacctaaagcggctatggatatccacacaagtcatcaccttaccctcactggagatcagccaagagtgagagtagtctaccaatacatagccgccagagaagcgcgctacgcctaagcagaagtcgaggccgtccagcccctcagagcagctccacagcacctgacccgtctgagtatccagacatcggagcatcttcttggcgtcagcagctgccgtgggtttgaaggaaatgaggatctgatcatccgactcataaaggacggtaggcgagaagtagtaggcccctggagtaaagtcctcgtagctctgtaagcgtgactcctctacgaagtactggctgacaaagatcttcttcggatagtatgaatgcctgtcattctcccagccaaagtgtggagtacgacgagggtaaccgagctgctccagcgtctgatagcgtacaagctggatctgctcatccttgtagtcagatcccgtcatctgctctgagaaggtaaagtgagtcctgagctgaggcgcggggagcttatccttataagccttgaaaatcgactgatcagtgtagagcttattggctatgggatagtagacaaacttcttacccagattcgtctcgatctccagggcatccccatattcgtggaagtagagagcgagcttaccaaagccctcactgagctctggcagcttatagtcctcactatggatctccttcacatcaagcgtcgagcgatcaatcgcaaagaggcgcttcttattgaggacgacatagtaagtcccatcctcgaactgacgtgcatccgtcacgctgaccctccccgtcacatcagggagctcgagcttcttgatgatctcataagtctctccatcgaagaagtacatgatgcccttcgcatgatcccagtccccactggagtcgtcacggcgcgcagcaccacagagcacgacgatggggcgccctgccgtactggagaaggccatgagctgctcacaggcgtaggacatatgctcctctccgtccctctccctcgaggtctcttctcgagagcttccccagacgatgagccctatggtaatgagcgagaagaaggccgccggcgcaaggataatgaggagtagacgcctaaggaaggtattaggagccggcttcgtctctaccttgtgatggatggtgatatcatccgagtcgagatagaactccgtcgagcagctgtcgcagcggtagtgatcctcactaatctttgtagcacgcgtgctaccacactgagggcatttcagagctttaatatgcgtgggcatccgaacgattaagctaagtggtgagctgcgtaagggagtgctacagcccttacataacaagaggatacaccaagagagtccgcctctatatgggcagactcacttggtgcatactatagtgggtgtgaaaatgcagagctacttgatgaaagtcgcgaactcttccatcgagttgcgcaccttcttcatcttgcccagccagtcacgctcggggtcagcgtagccgaggtaaaggagcgagacgctacgcaggcccttctcacgcagaccgaggagctcgtcgacgagcttggggtcgaagccaccgataggcgtgctatcaatcttcagctcagcagcctgggccagtgccagcccgagggcgatgaagctctggttagcagcatgctggaactgctcttccttaggcatcttaccgaacgtctccttcagcatatcggtgtagcgcttgaagcgaccacgtaccagaccacgctcatcggtcgtcaggtcgtagatctcatcgatacgctcgggcgtgtactcatcccaagcagcgaagacgatgacgtgtgagcactcgcgcatgcagtcagggttcagagccccttcgaccatcttctccttcagctcttggttgccgacgacgattagacggaactgctgcaggcccgatgacgtgggagccagacgtgctgcctcgacgatcttcatcaggtcttcttcacggagcttcttggtggggtcgtaggccttcgtggcgtggcgccacacgaggtcatctaatagtgccatattatttgtctttatatttaattaatagtgtcctatacgtatgtaaagataatcactctcgccgacctaagctacacggccggacgaattcatcgtaaccgcagagagaagccttcaccccgcccccgacaccaagccgatcaaggcgcatcccccctgctatcagcgcgccaccacgacagctctacgataggggcagtacgaacctatattggtcagcgggcgaacctatattggtccgtgcgacgacctatattggtcgcgaagtgaagctatataggttcgcccgctgaccaatatgagactgtttcggtagagtcctatcctctatttagagtactaaggcatcgcacgcccagctacccgatatgcctctccgaagtgatacacaagcccttcgccttatcgcaagtattcttcttatccagcgaagggaaaagcatcgttctcgcgaagaaaaaagcgccttcacgtagtggttttcctctgtctatgcacgtagccttaaagaccaggcgcgcaaatccaaatatccacgtacgtagatattagagccacgtacgtagcccaaacttttctgctactcatccacaacttttatccctacgcggagcaacgacctaatagaggtcacttctcaaagctatatagcttcgcaccgaaagctatataggaatcagtccaaagctatatagcatccttcgccatcctatacagctctacccatgcatccatataggttcacaccaccctcccctattcgtacactgagcgccctcccgtgagcggggtataaacgtaagcagaggctaccaccgctcctatgggagcagtgatagcctctgctatcgaaataggtgaagggactaacgcgtacccttgcgcgaccagccgaactgcaggccgaagatgaagaccaccagcagcaactccccgataccgaggaggaggtcacctggcatacgcatccagcggatcagctgcatgtgatcctgctgcatgaactctgccgagcgagccgaccagtaggcattcgtgatcgattcgtgcgcctgcaggataccgatgggcaggacgctcaccgtcaccatcaggaagagcccgatattgatcatccagaaggccgtaccgatgagcttgtcattccacttgtagtcagggtagagaccacgcaggcagaagagcatcagcccgatacccaggataccatagaccccgaagagcgcagcgtgaccatgcacagccgtcgtattcaggccctgcaggtagtacagtgcgataggaggattgatagcgaagccaaagatacctgccccgaggaagttccagaagcacatagcgatgaagcagtagataggccacttataggcttcgatccagtcggtagacttcgagagcttatagttgtggtaagcctccataccgatgagtaccagcggcacgatctccagagcgctgaaggtagcaccaagtgccagcaccgccgtcggcgtagcgctgaagtagaggtggtggaaggtaccgaggatcccccccgagaggaagatgatcgtcgagaagagtacagagaccgtagccgactggatgcgcagcagaccaagacggcagaagaggaaggcggccacgaccgtagcaaagacttcgaagaagccttctacccagaggtggacgacccaccagcgccagtactcggcgatagccatatgcgtctgacgaccgtacatcagcccagcagcgtagaagaaggcgatagccagcgaggcgatgatgaagagcgtcaggaggtggcgattctcatccttgcgcttgagagcggggatcagtgcgcggatcatgaggaagagccacagcacgaggcccaccagcagcaggatctgccacagacggccaagctctacgtattcgtagccctgatggccgagccagaagttctcgatgaggccgagcttctgcatgaccccgaaccactgaccgacgagtgagccgacgacgacaaagaggagcgcaccgaagagcacattcaccccgaggcgctggaacttaggctcgacccccgacacggcaggtgcgatgtagagccccgtagccagccaagaggtagcgatccagaggatagccagctggacgtgccagctacgtgataccgcctgagggaggaagtcctgaataggtagcccgaagagtgcgtcaccctcgaccccatagtgtgccgtgatcgccccgaggaccatctgcacaaggatgaggatcgacacgatccagatgtacttcgtcgtggcgcgcatcgagggcgtaggcttcataccacgcagcggatcagaggtgggcaggacgcctacctcgtcttccttcgactgagcatagtagtagacgaggataccgacgcaggtcagcagcatcagcacgctgaagcccgaccagaggtggagcgacgtgggagcgatattgccgatcgtggggtcgtgaggccagttgttggtatagctgacatccgtacctgggcggttggtgacgcagacccacgaagcccaagcgaagaaggcgctcatctgctccattttgcggggatcttcgatgctcttagcgcgcagggcgtaggccgagcggagcttcacgaactcaggcgaagcgtcgccgaggaagagcttcgcgtagtaggcacccagctcgtgggcgacctcagcacgcagcggtgagtacgtgatgacgcccgtcgcttcgtcgaaggtgttcttacgcacctcctcacgcaggaggacctgatacttagcctgctcagcggcagggagtgaagcatagtccagaccgtcacgctcggcgagcttcttcagcaggagctcagcctcacggtgcaggtagtcagcggaccagtcgggagcgatatacgccccgtggccccatacgctacctacggtctgaccaccgatggactgccatacgttttggccgtccttaatgtcttgaccttcgaagagcgtcgtgccatccgtcgtcaccaccttcgttgggaaggggggcatcgtgcggaagatctccagcccgaagaagccaagtacaccgaacgacagcaggatgactgccgccagtgcataccatagtttcttaggagtcatggttagttgtgagaataattacgcttatacttaacttgattttacaactacttgcgcattgcaaatagaaaccattcaaatataagtgatatttgattattcacactcatcagctcgatgaaattggcgaaaaccatgcatacaaccctaccacacagggggtagagatttacatattggctctacggaaatagaaggagggtggctacgaattggtacaaaaagccccgaagaccgaaggctttcggggcttatgatagcgagttgggggacgtatgcttagccgaaccagcgagcaaagagcggcaggaggatggaggtcatcagccccataatcccgatcgccagcccactcagagcgccttcgatagcacccatctggatcgctgcagccgtaccgataccatgcgatgaagcacccatcgccagccccttcgccacggggctcttgatcttcatcagcttcatgatcggagggccgatgatactaccgatgatacccgcacagacaacgatgaccgccgtcagcccggggataccaccgttgttaccagccagctccatcgcgataggcgtcgtcacggacttcggtgcaagcgaagcgatgagcgagctctttacgccgaggagatgcccgacaccgatgatagagccgatacccaccatagcaccgatggtgatagctacgatgatagagatcgcgttcttcttcagatgcgccacctgctcatagaggatgtagccgagagcgacgaccgaggggccgagcatgaagtgaatcatacggctcccctcgcggaaggtctcatagggtaccttcagagcggtgaggatgaggatcagctcgatgatcgtcaccagcacagggtgcagcagcgagtgcagtacagggacttgcacccagcgatggatcttgatattgatgaggtagaggcctatgacgaacgtgatcgtgaagacctcgctatggaagaagtgctcgagcatgattatttacgcctcctttccatttgatcctgtacgtaggccaccgaagcgatgacgaggatagagctgacgatgaccgccaccaggatgacccaccaattggccaccacggtatccagctgcgccatcagccccacaccagcggggatgaagaagagccccatgttgtccgtcagagcacgagcaggagagtcgatctgatgcaccttgacgagcttcagctgcagcgccaggaagagaaggagcatcccgaggacgctacctggtacaaatccccccatcagataggagaggaattcgcctatccagtagaagaggaagatgaagaatatcttgataagtgtctgcataagcaatcgtagtttgctacacctcgcaggggatacagagcggtgtgcagcgaaggagtggcctatacgaggtcacgcagtaggacgtccgcacgctcacggacagcagcataggcacgggtacgcgcctgccatgcagcagcgtgcacgccgttgagcttgagcgaaaggagttcgccaccgaagcgatcgatatgatcgaggagcacaccgagcgtgaggcggtcgggcgcgatgttggggcagtagtagccgcccataacttcctccttgccgtagttcacctcgatgagtatgcccatacgcgtcagctggctcagtgcctcctgcgtctgtctcagcggaaggtcgcaggcagcagccaaggtctccgcacggtaaggctcgggatcctccgaggtatagcgtgccgtgatacgtgccgtgagggcgatgaagacggtatcggcatagcggcgcgagagcggacggctattgggaggcgaggtgaagtgccagacgtgctgtatggagtaggagatctgcgccccaagcaggatgatgatccacgagagctggatccagaggagcgccagcggcacggcagcgaagctcccgtagatcgcgttgtagcgtgagatccacagcaccccattgatgtagagagcctggaagatctggaaggcaatccccgcgataagccctgcaatgagggcggggatgaagtgtacccgcacgtttggcacgaagaagtacaggcagacgaagccgagcgtcacgaggacatagggcaggagaccgaggatctgtgtcgtgagggctgagatcatccccagctcaccgaggtaggtattactcagggtggagaggaagagcgtcgtaccgctcgagatggtgagcagtagcgggaagaggatgaaggcaccgaggtagttgatcacacggcgtgaccaagggcgggcatagggtgcttgccagagacggttgaaggcatcttcgatcgtcgagatcagcatcagcaccgtgtagaagagcaccgccagaccgactccgatgaagaggccaccctgtacctgcgataggtagctctcgacataggcaaaggccttcccgaactccacctcgtgccctgggagggcacgcatcaaggcatcacgcaccgtctcctgcagtccgaagcccttagcgataccgatgatgaccgccaggataggcaccagcgaaagcaccgtactgtaggtaagcgaacccgcaagcgaaccaataccctcctcgatataggcctgtaccgtcatgtagagcacacgcagcgtcgccaccccgagacgggtaggagctgcgagcgaagcgcgcgtcagacgccacatatcgagcgtcacaaagcgccaagcagcgagggcttgcgcctctatatgccgcagtacgttaggcatagagtgagggtaatgaggataggataagtgatctcgtcgggagggaaggaggatgggagcgggacacccccgctaccaggagagggatatgaagaagaagcgcgcaatagaagcagtggagctataagccgagttctgtacccatgggcggtcacccacccgacgggtgtctgtcatttatctaggatggtagtcacctaccacctcgtgcggtctaccctccgactggggcgagcaaccctcgtagcgtcggtttacatgaccttgcaacccataggatgtacggcagcatgtattgctacacactccggtgagctcttacctcaccttttcaccatcaccgcgggggatcgagtcctccgtggctgtcattctctgttacacctacctaccctcgcggatagcttcccgttaggaagtatggcgctctgcgttgcccggacgttcctcacacgcccttcagcacaagactaaagaggtgcgcgacagaccgccccactgctctatagcgtcttcttttatttctgtagctctacgcgctgggtcggagcttgctcggcgttgcgacgctcgatctgctcgacgacattgcgtgccagcgtgcggaagtagatacccatcaggctatcgcgctgcgtggcgatgggctcgccgccgtcaccgcattcgcagatactctggatgagggggatctgcccgagcagaggaatgtccagctcttcagccagctccttaccgccatcacgcccgaagatatagtatttgttctgtgggagctcggcaggagtgaaccatgccatgttctccaccagcccaaggatggggacttgtacgtgctcgtcgaggaacatccccacgcccttgatggcatctgctagggctacctgctggggtgtcgtgacgatgagtgcgcccgtcagaccgagcgtctgcaccagcgtcagatggatatcgctcgtccctggaggcaggtcgatgagcagatagtccagctcaccccagttcgtctccgtgaggagctgcttgagggcgttactcgccatactaccgcgccagagcacggggctctccttattgacgaagaagccgatagagagcatacgcacgccgaagcgctcgacaggtgcgatgagctcctgcccgtcgacgtcctcgaggacgggacgctcgtcttcgcagccgaacatcttaggctgcgaagggccgaagatatcagcatccagcagcccaaccttataccctgcttgggctaaggctacggcgaggttagcggagacagtgctcttcccgacgcctcccttaccagagaagatcgccagcgtattcttcaccttcggcagcagtggtaggctatcctgaggcacgacctcggggaccttcacgctgatattcccctcgatctggacctcggggctgacgtaggtgaggatggctttctcagcggccttgacgaccgacttgatgaagggggagttgggcttgtcgaagataagcgagaagctcaccttcataccctcgatacggatatcgtcctcgaccatgccggccgtgactaagtcctgacccgtacctgggtagcggacacggcgcagggcgtcgaggatgaggttgggatatagtgtgatgggcataggaatagtgctattggactctgcgtgagcggctgaagctgcggtagctatcgggctcgatctcgatctcgggctcgacgaagccacgagcaggctccttggggatgaagtgcaggtacttgatcgtcagaccacgactcagccactgacgctcgtagtacgtcttgatcccgaggatcttatcctcaaaagccccgtcatagagatcggccgtatcggtcaggatctcctgatggttcagctcaacgaaagccttggtataggtgtagaggaaggggctatcggtcttgaggtgaatggaaccaccagggcgcaacacctcgagatagcgacggatgaagcgcgaggaggtcaggcgcttcgtcaccttcttcatctgagggtcggggaaggtgatccagatctcatcgacttctccaggagcgaagaagctcgtcagggactcgatctccccacgcaggaaggcaacattcgtcatacccgcctcgtgcgaagccttcgcacccgtccagatgcgagcgcccttgacgtccacaccgatgaagttcttctctggatacagctcaccgagacctacggtgtactcgcccttgccacagccgagctccagcacgatggggcggtcgttgtggaagaagtcctcacgccaacgcccacgcaaggggaagacctcctgctgcagacgtgcgaagggatactggagcacatgagggaaggtctccatctcggcgaacttcgccagcttgttctttcccactggcgattagtcaaagaggttaatgctctcgcagtactcgagctcaccctgcacgacgaagcggatctggtcgggatcgaacttccctaccccatccttctgggcattgcgtacgacatagtcgaccagctcgtcctcatcgatctcgatgggctcttcatcgtcggcatcatcgtcactcagatagccacggctctcgtagtagtcatagatgaggtctacgaagtaaacgatatcatcatcggagaggagctccttgagctcctgggggatatagttgcggatgaaggccaccgaagcggtatcatcatatccaagcagttcgtcttctaccataatatttatagggaggggcttgcccagtgaggcaaggctatagttacccgtgcaaaggtaataaaaagcccccacggcaggggcggaagggagatattcacacctactccataagccatctatggtaggcgcgaaggagcctacccgatcagccacaccctgcgatcatcccccacgaagctgtgccctacgggatttacttctctggaggaaaatcaaggaatagcagtggtatgacttctgctgatgacgaataaaagtggtggacctatagctgataagctggatctatgtacgtggatctaaaatccacgtacatagtctttcggatttacgcacctggtctttaagactacgtgcatagacagcagaaaagcactgtaggacgctacttttttcttcacgggaatagcgtttccccctctactggatcaagacgtatgctatatcgtgaatgagcagtatctttggatagataggggaggatcattcacttagtccctccccccacttcattcgatgactcgctccagacagataatttcctttgccctcatagccctctgcataggcctcttcttagcgccacttcgtgcctccgcccaagagcagacgacagcgcccattgatagcacccgctatacccatctcatcgactcctgcttcacagcaggcaaccgaggtgattacgctgctgccgaagccttcctcgcagaggctctgcgactcaatccccccgcagccctgcagcctatgctactcaataacctcggggggcttcagctcctgcagggtaaggacgatgccgccctcctctccttctcctccgctctcagcaaagatccccacgaagcgacgacacgcttcaaccgcgccaagctcttcgtccagcgcaaggagtacaaggcagccctcacggacttcgccctccttctcagcgaccatccgaagaacgagctctaccgctaccagcgcgcgatggtctacctgctgacgaaggagtatgacctggcggaggccgacctcaagaccatcatcgaggagaatgacggctcgctcaaggctcgcataggctatgccctactggagacgatgcgcggacgctatgacgaggccgagcgcctctatgccttcctcacggacaagctcccgaagaatgccgaggtcctcgagggacgcgcacgtatgtatatggctaagggtatgcgaggcttcgcccagcgcgatatccgtcaggctttcgagctcctcggaggtcgtgcaccagctaccctctaccgcctgcgagccgagctgaataccacccttggcaacaccaaggaggcggccgaagacctgcgccgtgctgaagagctggagaatcccaagaacaccgccatgcgctaatgaatcatatcgaccccttcctcaagcaagtcgcggcccactactatcagcaaggagccgaagagctcgccaagctacgcttcatcttcccctcgaagcgtgccctctccttcttccgccatcacctgagccagctggctacggcacgccccctcttcgccccacagatggagacggtgagcgaatttatgcatagcctccagcctcaggtgcagatcctcgacaagaccgcactcctcttcaagctctaccagacctactgcgaggtacgtgccgagcgaggcgagatgaccgagagctttgatgagttcctctactggggcaacattattctcaaggacttcgagacctgcgaccgctatctggtgcgcaccgatcacctctatcgcaacctgagagacatcaaggagatctccgacgacttcagctacctcaccgaagaagcccgcgagatgatccagggcttctggggggacttacccagccttcagagcatcagcgaagacgacgacaagggctacaagaagcgcttcctctccttctgggagtgccttgctccgctatatgagcggttcaccaccagcctgcaggaagagggctacgtctatgacgggctgctctatcgccgtgccgccgaggcgaaggaagaggtacttgatcagctggcgggggatgaaaagctcgtcttcgtcgggctcttctacctcaccccctccgaggagaagctctttaagaccctcacgaaggcagggcgtgctgagttctgctgggatgccgctgtcgaggtcgtacacgacaccaaccaccctgcgagcaagtacttccacaagctctgtaaagagttcggtcaagtcgatggcccgtggaaggagggagctcgtacgcaccacctccctcatgaagtacaggtcatcgagtgctccagcctcctctcacaagccaagggactcccgacgctcctccaagagctgaacatcgccgaggcgacggagaacctcgaggcagctatcatcctgcccgacgaagggctccttctccccaccgtcagctcgatacctgacgacatcggcagtatcaacatcaccctcggctatccgctggaccgcacccccatcgccctcatgctgaagcgatggatcacgctcatctccttcaacctcaagcgctcggagagctcggcacgctaccccgctgaccagctcctcgggctacttggccaaggactgatcacggcacacgcccccgaggccacacgcctcatggagcatatccgccagagcaagcgtttcttcgtccccgccaaggatctatggacggacaagacggaagctgagttcctacacctcctccttgacccgctctccgagacgagcgatccactgcagcgcatcgaggccgtactgctccacctcatccaatcggcccagcaagagatacataccagtgaggaccacgaagaggagggcgaggagcaagacacagcgctcgtctatgaagggctctcgtccttcgacatcgagttcatccaccactatctgcgcctcatcaaccgcctgcaggggcttatccagcagcatcagatggtgctgggcttcgaggcaatgatacatctcttagagggcttagtggggactgtgaccattcccttcgagggcgacccactacaaggtctgcaggtcatggggcttctcgagacacgactgctccacttccccacgatgatctacctctccgctcaggaaggggctcttcccacgaagcgctacagcgacacgctcatcccctacacgctccgccgaggcttcggccttcctacgggacgcgccgaagaagacccggggcaggactacaccttcttccagagtatcgcacgtgccgagcgtctgaccttcgtcgtagcgcccgccagcgacggctacaacctcggcgaagagagccgctacatcagcctactccagtacatctacggctgcgacatcaagcgccgctccctccgccttgaagccaaggccaaggagagtgccggtatctcgaagcgtaaagagggggagctatgggagcagttcgtccatcgtacgacgaccgaccccaaggtggataccgaccgtaaggccgtccgcccgctctctccaagtagcctctcgaagtacgttgcttgtccgctgcgcttctactacgaggcgatctgtcgctaccgcgaagaggattcccccagcctactcttggcttcgaatgagttcggtaccgtactgcaccgcgtcatggaggagttctactcagaccttaccaagagcccaagcgcgggagaacaactcaccttcaccaccatcaccaaggagatgatcgatgagaagctcagagccaaaggctacatcaggcagcgtgtagagaaagcctatcgtgacgagcttaagctcaagcagggcgtaccactcagcggactctcacgcatctattgccagacgatcgagcgctatgctcgtgagctcctcgagtgggatagtgcgcatgccgcatcctttagctacgctgcgagcgagagcgaggtctatgccgccttcacgctccgcagtggtgagaccgcctatctcggtggtatcatcgaccgcatcgaccaagtcgatggcaagtatcgcgtcgtagactacaagacagggaatgcctcactcacgatctctacgcccaagaaaaagcccgtagacttccgatgggaagagcggctcaaggatcctaagaacaaggctatcctccagacgctcatctattgcgctggcttagctcagacctacaagctcgacgagtctatgatccaccctgctatcttccgctttaagggaaatgatggcttggtgacgaagcgggagaaatacgatcccctcctcaccttccccatcggtgaaaaggaaagcaaagtagcagccccctatgctgaggtcaaggagtccttcgaagcactcctcgtagatgagctcttagccgaactctacgacaccgaccagcccttcacacagaccgaggacgacgagcagtgcgcctactgtcccttcgcccttagctgcggtcggtaaagcgagcggcaagtaggcagcacccgagctacggcttcatctcccataaaaaggccgaggtgccgcatgactcagcatcagctgagcacatgcggcacctcggccttttatattattctctaccggagaaagctacccattaagggtgctcctcggtagtgaagggacggcaggagaaacggagaacctcccctaatcgtgcatcagaaagaccagacccccagaagtaagccccattacataaagcagtctttgataaatctccaatccagtagaaagtagtacctcgatgaccaatagttataggggcccgccaacctagtacctcataggaggtatagtgggtaggaagaatacgacgctccttacgcatagagagatcgctccaaaacgtctcattggcaatatcatctaccccgccaacaaagtgtgcaccaagatgaactgcctcaacttggaatgcggcacggtcatataactccggactactttttgctagcgagaactgagggttcaagtggtaagagtttcgagcccgagtatagctaatactcaagtagggatttgcccttgttggagcatcaggattattaactcgctcatagcggtaagccacgctatacttatttgttccgccaaggtttctcaaggcgacagcatagacgacgttacctacacgacgggaagaatagaccgtagttcccctcaatgaagcccccaactgcacattcacagaagcattatccacagtctgagctcccgagagattcacggcagcttgcccctgtatagggatgacactttcccactgctgaggagaaggagaggtataggttcgactattatgcgatagttgaacctgcttaacttcccccattgtcagcatagcaaaggaattgactccatgctgtgtgtcaagctgattagaacttccataggggatgcgaccacctttcacaaactgccatggctccttgcgcatgagattgtactccgccatatagtccagaggcgtgtaggggttgtagtagaccgcatcgaagtagacgctcttccccgagagcacctgatgaggatgcttcttaccatagatataggtatgcttaggctcgaggatacgagcattactactggtacccgtctcagcgatgagagtcgtagagagattcgtaccagccgtattcgtagggatagcccaaaagagaatcgtggggataccagctgcgacattgcgcttcacatcagcgccaacagaagtatcggagaagatctttgcgctacttccgccctgcagagagaagacatcacccgtgaagatcttctcatattcgggggtagaagcattgagtgcagtaaactccttcttcgcagctgcagtctgagagggaacccacttcatcagattgccattattcgcgccgccacgatcgagttctgacttacccttaaagtcgaccgctggcaggtcattcttagccaagctaaagtaaccggcaaagctcagagaagtcgatacgatacgcagtgtattcaccttgagggcaacctgttcgctccctagccgctgcttataggcatcatccagtcggagcgtcgcacggcagaggacgccttgagggaatacctcgagcttacgctgcttctcagcctgcgaccagtctttaggccacttgggatggccattgggataggtaggcatctccatccaatgcgatacagcagggatatccattacgcgaccagtcgatgtagctacaggggcagcttcaggaccgcttgcgccgaacttcatctgcccagcattctcatcgtaagtgccccccatagcgatcatgatgtaccacttcttacctggagcaagagtaagagcctgagcgcagcttgattcgctccttctcaatgtggtagcccgtggcagtcttcaccgccttagcctcatagtaggtaggctcatcattgccactactgcggatgatgcagagtacaggcagctcattagggagcgtgataccatgacgccccttggcattgagcgtggggctgaccgtagctgagataccacggagcgtgctctccgtctcctcgctgaaggtgatattgaagtccgctgcgagagggaagtcaatatccccctcacgataagaggcagctgcctcttgagcagtcttggtctgtacgggttcggaggtcgcttcattgcgacaagaggcaaagagccccatagctgcgagagccagtagcgggaaggtacggcccatccagcgagagatactaatagtcgttgtctggttcataaccttgaatttcatcaaaacgatagtcgacaggagccgaaggatcaacaagcagatcacccgtatggagcgtatagagctccagtgcgggcgctacgtaagcctccttcgtgggaagcgttgagtacattttactcatgtgaagaattagttcctaatatttaagaatagagtagagggagtagatacgtcttacaaatcaaaagcaagagcgcctcaggagctggtgatccccaattcacaggacgcaaccagccaaataaatcaagcgcaaagatacgacaataaaagcaaagcccaacatcgacataggactcctgcatcaaaagctctcctcaccagcaatccatattgaggctaagctgatttgcaaacgactattgctctgcaggcgaacaactattggtttgggcttcaaatgactattcgtttcgcctccgaacgaatagttcttcggatatgaagcactatggattttgcagtacgcatataaacgacgatagggtgacgaagccgcatcagctccatcaccctaccccatagatcatcctgtagtatgcgactgcatagcttggtgcctcatcgctcgctgcatcgcgccttgctcggcatagcaagctgaatagcagtaaatggaatggtagcaagcagcaagctcactgcatcatcatcaccttgtataaaacgaagtgggtgtgatcacttgcgtaatcacacccactctccttaaaatggcggctacctactctcccacgaaacgcagtaccatcggcacgattgggcttaacttctctgttcggaatgggaagaggtggaaccccaacgttataaccacctaaatatctctgtatttagacaatcattgacttgataaaaacgcacaatactcactcacgtatcgctaagtcggtatacaacctctggcaaaaactttcgggcaattagtactactcggctatgacgtcaccgcctttacacctgtagcctatcaaggtcatcgtctataaccacccttataatgagatctaatcttgaggcaagcttcgta

SEQ ID NO: 71 - DNA, 227576 bp, Porphyromonas bobii
  source 1..227576: mol_type = genomic DNA
cgttcggatggttgccgaacgcccttggtatattccccgaaaatgtgacgcttcgtttcttctcagcggtgtgtgggggtgtacgcttcgtttgcgatgtgccgcacgcttcgttttgcggattatagatggctgtcggggctgctggagatgcatatgacaatagagagctcatccgtcgcctcgcgaacctgcgtctggagcttgctcagctcttaggctccaagagctttgctgagaaggtcctcgcccgccgtatggcaggtagcacgacggcagtctatgggctgctcgacgagctcctcgaggcttacaagcccttagcagagaaggagcttgctgcagtggctgacttcgcacgcgaggcaggcgctaccctccccctccagccctgggactggagctactgggcagagcgctataagcaggccttctatgagctggacgaagaggagctacgcccctacttcgagctatcgcgcgtctcggatgccatcttctcactggcaacacgcctctacggcatccgcttcaccgagcgcacggatctgcccgtctaccacagcgacgtacacacctacgaggtgcacgatgctgatgggagctatctcggacttctctacaccgacttcttccctcgtgagggcaagcagagcggtgcctggatgaataacctgcaggagcagtatcacacggccgagggggaagaccatcgtccccacatcgtgctggtgatgaacttcacccagcccacagccgatcgtcccgccctgctcacgccaggtgaggtacgcaccttcctgcatgaattcggtcactccctgcatggcatgctctctacgtgccgtcacggctcgctcagcgggaccaacgtcgtccgtgacttcgtcgagctacccagccagctgatggagaactggctggacgagcgtgagtggctccagagcttcgccgtacactatcagacgggtgaggcactgcccgaggtccttatggagcgtatggagcgtgcccgccacttcctcgctggctacgctgcctgtcgtcagctgagcttcggctacctcgatatggcttggcacacgatcaccgagccacttgccgagggccttgacacgaagaccttcgaagatacggcttggcagaaggcccagctcctgcccgctacgcctgcaccttgccagatgagcacctccttcgggcacatcttctcggggggctatgcagctggctactacggctacaagtgggccgaagtgctggatgccgatgccttcgccgccttccaagaggaagggatcttctctacggctacagctgagcgcttccgccgtgaggtactgagtcaaggtgaccgccgtgatgccgaggagctctatcagagcttccgtggcaagaaggccaccattgatgccctccttcgtcgcgacggcattgagcgctaagagcagaccttctaccccaataaagcagcagcgccccacagtctctccgcgggtctgtggggcgctgctttttcataagtagatctacctcataggcgctaaactttgcctatctttgataagccttagggctcgtagcggactctctccgcccctactcattcatcgtactaccccaatgaaagaacaaacctacaagctcctcgatggtaaagcgacctccgctcagatcaagcaggagatcgcagccgaagtagctgcccgcgtcgcagctggcaaaaaagccccccacttggtagctatcctcgtcggacatgacggcggcagcgagacctatgtagcagctaagatcaagacctgcgccgaggtgggcttccgctcctcactgatccgcttcgaggatgacgtcacagaagagcgtctgctcagcgagatcgagcgtctgaataacgatcccgaggtgcatggcttcatcgtccagctccccctgccgaagcacatcaacgagcagcgcatcatcgaagctgtcaaccccagcaaggacgtcgacggcttccaccccatcaatgtagggcgtatgagcatcggccttccctgcttcgtgtcagcgacccctcaggggatcattgagctccttcgccgctacgacatcgagacgcgcggtaagcactgcgtcgtccttggccgtagcaacatcgtcggtaagcccatggcacagctcctcctgcacaagggtactcctggcgactgcaccgtcacggtctgccacagccgtacgcccaacatcaaggagctctgcctgcaggcagacatcatcgtcgcagctctcggcgtgcctgagttcctcaaggccgatatggtgcgccctggtgccgtcatcgtcgacgtaggcacgacgcgtgtacccgatgcttcgcgtaagagtggcttcaagctcaccggtgacgttgccttcgatgaagtagcgcccctcgcctcctacattacgcctgtccctggtggcgtcggcccgatgaccatcatctcccttatgctgaataccctcgcagcagctaagcaggcagaggactaattcgcacacacgtcccctcctttgcgaagggaataaaaagcctcaggggctgtatctcacgatggagatacagcccctgaggtctttttcgtaggagggagaagcttagttctctgcgtagaaggtcagctcaccgataccaaagtatcccgagataccagaaggcgtgacagctgcgatctttatacccttagcttcgatagggctgaggaagcgaactacaacggaaccctccttattgaagtagctcgtaggaagcacaccctgagaagtccaagtcgtaccatcctgcgtcgtgaagatctcgacttcagagaaggtcttcatggagtcatcagtacccttgaagtgaatgtagttgaacttcttcgtaccgctggcaaggataccagttacccaaggcgcgctgtccgaagtagaagcataccaaccgtctgagggatcaccatcatagaggtattttttatcataggcgaacgatccccaagcgagctcagaagagactgcatagttgatcactgcaggggtcagtgccgtaccctgagggtcatgcgtatagaaggatacgttttggtagctcttcctgacagggatgaagtaggtaccatagtcctggctaacaccgacggaggatgggcctgagacagcagatacctgcacagggatcacatagtactccgtagcagcatcagccgcagagatctcagcatacttatcacccacactgatagtgatagctgaagagctcttcgtctgccccttagggatagttacggtcgtggtcgaaagcttagcatagccttcgggagcgaccttatagccagggttggtcgagagggagctggtgaaggaagcgatagaagcttccgtcgtagcgagagctacagtcaccgtcacatcctgatcaacgggcttggagaggtagacatagcgctcctgagcggtgaactcagttacggtcgaggcattgtgcgtgacctgaagagggctgatagacttagcgaggtcgaattcacccgtcttgatatacgctacggatgcagcagtctgtgtctctgtcttatcaaagagaggagtatccagatcaaagctcttgctacaagacgtgaggccaaggaagagcgctgcgcaagctatagatagagtcttttgcatattaaacttctattagaggggtcgtacacgcccctcccagcgaggagagggccgtgtcgtaccaccaatattacgattagggcaccttgaccgtaccggtaccgtcagagcggacgttagagacccaagtaggcgtcagaatctggctgcttgctgggttgttctcatcgtatgccgcgccatagacgttgagtgcagggccaccggcgatcgagttagcaaacgtgccaccatgaccttcgttcatcttccagtagtggaggagacctggggtcgaaggatcaacggtgtactcgttatccttcagctgctcaggcgtacgagtcgtattccagatacgaagctcgctgaagatacaagcatttcggaaccaagcagcacccgagccagcgacgtggatagcatcgttgagcttgaaggtacgaccagcaggcttgtccgtgctgatgaccttgctaccattgacgtagagcgtagcctgtgcgccatcgtaaacgagggcaacgtgataccacgtattcgtcttagcaccttcgaaagtacggtcgatctggccaccatcaccgaacttgatgttcaggtagttgtatggaggcgtagcatcaccgaagcgcatgtagatctcagagcccggagcccaagcaccgaagatagcctggttattgatgtcgaggccattgatattcacacgcatctcaaccgtgaagcgctcgaggtcagtagcggggataccacgagcgatagcacgatagtatacccccttgtacgtaccgaggataggagcacttgccgaggtgatcgtcttgatagcatagacgtaggtgtcagccccattaaggataggagtagaggcatctacgctcttgagcttaaaggcgacagcatacttcttaccgaggttcatctgctcctgcgtcagaggctggagagttaccttcactgcttcggagaagacagcaccagccttgacgacaacctgagaggaagagagagcgacctgacttgcagggagcatcgtgtaggccgtcccgttgagcttgttgtactcatcgagagcttcctgactcagctcaagtgcataggtctggtccttgctctggggcgaagagatgcggatattgatatccgtagagacttcgctgtctccgagctggagtgacccgatacgaccagcctgcgtacccgtctgggcgatgtaagcttggttcgtgagctccttgagttctctgtcgttacaggagctgaggagtgcagcagcagctacgactccgaggagatatttattgatcttcattggattcgtctacttgatctgggggttcataagctggatagcacgacgccaccagggataagagaggcccttgacaggcttcatgtcgatcccattcacgacgtcaggcgtagtgacggcatactcaaggtctacacggaaggcaccgacaccacccttacggtaggtgacaccatcgatgacggggttctgcagggcgaagttgaggatctgccccagaccagccttaccaccggtggtagcacctgactcgaagtctacaacgaagatgctcttcttacagatctcttcgaccgagagaacgtccttataagctctgagcataccctggaagtggttgttgttgtagccaacagagttgttgtaggcctggatgatgaagtagttgaagtacttggcgtgcgaagcgggaagagcatcgggctcaccgtcgacagcaaggatcttcttacgaccagcctccgtctccgccatagggccgatacgcttaccaagggtctcgatgaagagggtcatgagcgtaggcacaccattctccacatcctgctcccacagctctttctgagtactaaaggggtgagtatagttaggctcagcgtcgatatcgaagccatcgtagccatacttatcgatgaggtcgcagatagcattagcgtacttgacgacagcggcacggcgagcagccttaccttcggccgtctgctccgtgctccagccccagtatttgtgagtccaagtctcaccattctgaagtgcagccttttctgtatccgtaggatcaggcgtgataccaccgcccatatcgaggacgaggaagcaaatcattgccttcaggcccttcttctgctgtgcatcacgcaggtccttgagctgagcttctgttggattcttccacccgccccagagagagacgaggtctacagagtcgggcaggcccatcagtgagctctgcatattcgtaccaacacccgtccaagcgctgtagtaagagaatgcgatctggtgatcagagttcttgtagtcgcgcagagccttgtagtaggcctctgagtggttgggctgagtgaggtcttcgggatgctggatctccatatccgtccacttgctgcacgaagccagcgtggtcagagcgagagccgataccgcgaggatattcttgatcttcattttttgattcgttagctatagttacttcttctgccaccagagcttcgtagcgtagtcgtcagcaccaccgagggtgacgagagctgcgttgtagttagcctggttacgggtacgctcgttgacgtcgtaggggatacggttagccacgtggatggtgtagccgttggtagagacggggagcgcgaagaccttaggatagccagtacggcggatttccgaccagccttcctgaccattggggaagagagcgatccacttctggacgatcagacgctcgagcttggcttcgtcagaagctgagtcatcccacttaggcgtgatggtgctggtagcggacatgtccttaccatagccaccgacagcatccttgtagtcagcaggagtcttgctgctctgcaggtaggcatcagcaccagagacattccactgagtgaaggactccttgacaccgcgctcatagagatccttagcagtgccacccatgcccgaccaaccggccagcgcaccttcagcacggcagaaccacatttcagcagcagagagccatacgctgggggagttcttcgtgacagcagcagccgaataaatttcgtcagcagtgttcttattcttcacgtcagcaccagccagacatccgataagcttacggtcaccagccttagcaggggccgcgaagtaagcagggatgcgagggtcttcgtagccgttcatgtaggagtcgatgtcggcgcaagcacgagagtcaccccactcgaccgaagtcttgtaaagaccacgagggatataggtgatagcgcagttgtcagccgaagactcgataacaccagcctgcacggcctcagtagcgtactgctgagccagagcaggagcagcatagcgcatacggatagcgatacgaagcttgagcgagtgagcgagcttgacccacttagagaagtccccagagtagatcttatctgcagcctcattgaccgtacgacctgggttagctaggacgaaggcgttgatattgcttgcagcagcatcgaggtcagctacgagagccttatagatagcttcctgagagttgtaaccttcgaggttagtcgcatccaggccgaaaggcataggaccatacttgtcggtcagagcaaggaaggcgtgagcacgcatgatgagtgcccagttgtagttgaggtcttccttaccagcgaggcttgcgatttcagcgaacgcactctttgcagggacgaggatctgagagttcgaccacccgagccagccacttggagcgctgaaggtggcgaagttcttagagctccagccgttatttgcgtaggtgaagtaacggccgaggtagttacccacgaggtcaaagttacactggtacgcgttctcctgctcggggaaagctacgttctgcagctgaacgaggaaggaggagatattgtagttatcacgctgcaggacctccttgctctggctaccgccagggcgattggcttcttcaaagccactggtgcaggaggccaaggcgagtgacagggcagcgatgccgagccccttggcgatatgattcttcttcataagatacattcttaataaacgtctctaagaatacgcttagaactggagcttcaccgtgaagccgaggttacgcaggctgggctgcatgaagtagtcgaagccctggtagtaggtaccagtagaagcggtgagctcggggtcgaatggagccttgttgtagatcatcagcaggttacgtgccgtcagaccgagcgagaggcggaccttatcgccgaggagcttcttaggaatgaggtaggagacgtgagcttcctggaggcggacgttcgtaccatcatagatgtactctgaccagacggggcttgcaccaccgactacagagtagtagccctgagcatcgatgcggccgttacctacagcgataccaccagccttacgagcatcagcagaagcctgagagacgccgtactcatcgaggatagcctgcgtctgagagaggacgataccaccgagacgagcggagaacatgaagcccacattcagccccttccagttgaattcattgctccagccgaggttagcatcaggcagtacagagcccttatagatgggattgtcgagcgtctcggggatgatcttgccatcagtagagaggacaggatacccctcgggagtgcgcttgataccggtgttgatgtagatgtcacccatcgtaccaccttcgcgaaggtagacgtcagcgcccttcagaccacccttagagataggatccttgcgaccagggatcagctcgatgatgcggttctggttagcgctgaaggtacccgtcgtggtccactccagctcgccgaactggctcgtccagccgagtgagagctcgataccgcggttgcgaacattaccagcctggatgtactcctcattaaagccgttggaggcagaggagagaggcatacggaaggtctgattcttcgtattggactggtagatggtggcctcgaggctcaggcggttgcggaagaacttacccgttaccccagcttcccatgaataggtcagctcaggcttgaagtcttcggggaacttatacgtgaccgtagcgtagctctgcgatgcggggtcgtaggtatagcggtagggagaagagatctgagcagggataggcgaacctaccttagcccaagagatgcgcgtcttgaggtagttgacccacttaggcatcttggccatctgcgagatgacaccagagagacctacagagggatagaagaaggggttagccgtggtgtgagccagagcagagtcccagtcttcacgacccgtaagcgtgaggaagaccatattcttccagcccgtttctacgcttgcaaaagcagagttcgtgatgtgcgagctattagtgtatacaggagcattacctgcagtaggctgaccgtagtcgatctggttaggatcgaagacgttagagatagagcggagaccgccgcggaagccgcgagcgtcgttgtaagagcggttggtagataccccgacgttagcagcgatagagaagtcgtcaatacgcttgttgatgttggccatcacgtcaccatagagtgaggtgttgttacccttgctgtaagagtagtagccatactgtgaccccgtgaagagggtagccgtagaagcgtagcgcttgctttcgtcgaagctgttgatgacgtcagcacgagcacgacccgtgatgtcgatccattcgttgatcttccacttgagcgagccgttgatcatgtagcgatccttgctgcccgtggtgagcatgcggttagcgacccagtaggggttctgctgtgagtaagcatcaccgtagttccagttctggacgtagatcttacggatagggtcgtagacctcataggtacgtacaccatcgaagttctcaccgcgggggaagagatacagaggtacgatggggttgaggtattcaccctgagcgatgaggttctggtcgccctgacggatgtagttgaagccgaagtcaagcgtcagcttatcttcgaggaacttcgtcgtgttgcggaagttgaagttgtagcggtcgtacttgctgttagggatgataccagcagcattagtcgagccgagagagagatacgtctgattcttcgcgttaccgatagtcagcgaagccgtgttctggatgttagaacccgtgttgaagaagtcagcgggatcgaacttcccatagggagaagccgtctgtgcaccccagctcttcacgtcaccaggagcgctgatgaattcgttctggaagcgaggcatgacgaagggacgagagaaggaggtgctgttggagagcatgacctgcacgcgaccatccttacccttcttcgtggtgatcatgatgaccccctgagcagcgcttgcaccatagagtgcagcagcagcaggaccactgaggacgctgatcgactcgatatcgtcagggttgatgtcagagataccttcacccttaggctgcgaagagtagcgaccgttcgtctcaccaccgttagtgttgatgatgggtatcccgtcgatgacgtagagagcctggttgctctggttcatcgacttaggaccacgcatgacgacacgcgtagcaccaccgagacccgaggaagaggcgttgatgtttacaccagcgaccttaccgttgaggctattcatgaagttggcatccttcaccgtcgtaagagcgtcgctcttgacctcctggacattatagctcagggccttctgcgagcgcttgataccgagagcggtgacgacaacggcttccacctgattgtcttcactggggagctcgatcttgagctcagtctggttaccgacagggacctcgatcttcttgtagccgatggacgatactacgaggaccgcacctgccttcacgttcttcaggctgaacttcccgttgatgtccgtggaagcaccttggccttgtacgcccttgaccaggacagaagccccgatcacaggctcatgattagcggcgtcgaggacgaccccgctgatgctcttaccctgcgccatcgcggtagcgaccgtaaggaagaggatcatgaggatagatagtactttcttcatatctgaaacattaaaaaataatcagcacacaggtgtccctcatctatgctcgtggagcacggagctgaggggcacacaaaagaaaagccccaaagagctgacggccatagccgagcatcttctgggctctattattatatcggtaggaggtataggtctgacgcgtcgaccaaatggagctgtccatctgtgtcgccatctcctcaatgaggggcatagccaccgaccactcgcgcatatcgcaagccatgcgacacactcgtgtagagtcatttgagagtaaaaggggcatcacgcccgaatgcttgtccatgtaccttccgttacaatctgggggacaaagatagagataaataacatgcagagtataaggcttttcaatcctccacttaataaaaaatttaaggaagtgtagtggtttgcgcgccctcctccgctagtcagaaagaaggggcaagggaagggcgagctgcgaaggtgggccaatcataccatacacctatataatagcataccatacccttatacaataacatgccatacacctaataatataggtagggaaaggacggaggtagctactcttcacggcagtccccgagatgaatcccagcctatctacgcggtattgaggctatgtagtacctttgtgacaccatatataatagtagtgtcaccgtagggcgcttcccactcccctactcccttatgacccgactcatgatcacgatagaagacctctactccatctacctcgcccatcccgtggtgagcaccgatacccgccagctacccgagggctgcatcttcttcgccctgcgcggagcacgcttcgacggcaatcagtatgcccgtgccgcactggaggctggcgctgcctatgctatcatcgacgaccccaacgcacagatcgacgagcgcacgatcctcgtcgaggacagcctgaaggccctacagctgctcgcctgccaccatcgtcagcagctgggtacccccgtcatcgcgatcactgggacgaatggtaagacgacgacgaaggagctgacggcagccgtcctctcgacgacctaccgcctcctctataccgagggcaacctcaataatcatatcggtgtccccctgaccctcctacgcctcaccccagagcatcagcttgctctcatcgagatgggcgccagcaagcctggggacatcgccgagctatgcgccatcgccgagcccaactacgggctcatcaccaacatcggtcgggcgcacctcgagggcttcggctccatcgaaggggtacgccgcactaagggcgagctctatgatagcctccgcgcccacaagggtatcgtcttcttccgtgccgaagacaagacgctcgaggagatgagcgaaggtatcgaccgtatcgactacggcaccgatcccgaggcgcgtatcgtcgggcaagccacccccagcacgggcgatcagctcttccttcacttctcctgggcctgccccactctcggcatcgagcagcgtagcgtacagacccacctcgtcggggactacaacctcgccaacgctctcgctgcgatcaccatcggactttacttcgacgtagctcccgagcacatcgacgaagccctcaccagctacgctcccagcaacagccgctcccagctcatcacctccgctcgtggcaaccagatcatcgcggatgcctataatgccaacccctcgagcatgcacacggcgctggacaacttcctccacatcgagccactggatcgcccgcgcaccgtcatcctcggcgacatgaacgagctgggcgaatcgagccacgaagcccatcaggagctgtatacccgcctcaaggcacacacggcctcgccactgacgatctacctctgcggtccgcattgggtagaggagctcggagcatcggatcacgtcctcccctcggtcgaggagctcatcgcacgcatcgaggcaacgcccatcacggacagcctcatcctcgtcaagggctcgaacggcatccacctcggccgtctcctcccctcgctataagcaaagagcgcatggatctaccgtattgacgagatccgaacaaatgcttatctttgtagtagaacaaaagaaaagagccacgttgtcgattgggaaactcatcgtactaagttgaaaaccgaggcaaccctctcctccaatggcgggctaccgaggccttcgggtctcctcgcctatggcgagcagagtagattacaaagggggcggggatctcaaatcctgtttttcggagttttcacttaatctgctcgtggctcccccaagcgtaggtcactcaccgatactcaccgagtatcatgtgagtgacctacttcttttatcgtcaccctcccgtttcagtcgcgatgcacttcgtagaggggcttctacagcctgagcgctcctgcacgatagaccaccacacctgtttcgtgcacgctattcaccaataatcgccgaccaccggtattattcgctcgtgcttagggtgctatttctccgaagtcatacagctataccttcgtctacgtacgtggacgtaaggactacgcacgtaaagcctaaagtctacgcacgtagattttaggactacgggcgtggtcggaagtttaggactacgggatgatggcttttagtcatggagaaacgagtttttcttccgcgaagcgtaagttttccgcgtattgatttagccctcaaagcactacaatgatcgagctctcgggagggagatttttctcctctcgaggcacagtattttgagctatttgcggtaactttgcaccacactgcagaggaagccgccctcgcaatccattcattttcagtcatcatgcagcctttcgtacacctccacgtacactcacagttctccctccttgacggccaggcctcgatcaaaggccttgtcgacaaagctatggccgacggcatgcctggcattgccctcacggaccacggagctatgttcggcatcaaggagttcttcgactacgtcaataagaagaacggccccctacttcgcgagcgcaaggatctcaagaagcagatcaaggccctcgaggagcaggaggagcgtagtgcagaggacgaagccaagctgagcgagctgcgggagcagctacaggcggccgaagccaagcctctcttcaagcccatcctcggctgcgaagtctattgcgcccgtcgctcgcgcttcaagaaggacgccaacgtccccaacccctatcgccccaaccaatccgtggacaatagtggctggcacttagtcctcttagcgaaggacctcacgggctacaagaacctcatcaagatggtctcgcgctcatggatcgacggctactactaccgcccacgtatcgacaaggagctgctggaggcgcaccatgagggcatcatcgcctcctcggcctgcctcggtggagagatcccccagcacatcatgtatggcaatatcgacgaggcggagaagagcatcgagtggttcaaggggatcttcggtgatgacttctaccttgagctacagcgtcacaagaccgacaacccgctcggcaaccaagagacctacgagaagcagcagcaggtcaatgccgtcctccttgagctgggtaagaagcatggtgtgaaggtcatcgctaccaacgacgtccacttcctcaacgaagaggatgccgaggcccacgaccgtctcatctgtctcagcacgggtaaggacctcaacgacccccgacgcatgcgctacagcaagcaggagtggctgaagacgacggcagagatgaacgagctcttcgccgacctacccgaggtgctcgccaccacgcaggagatctgcgacaaggtcgagctctacagcatcgagaatgatccgctcatgccggacttccccatccccgagcagttcgccaatgccgacgaatacctctgtcatctgacctacgaaggtgcccgccgcaagtacggcgaagagggaatcaccgaagaggtacgtgagcgtatcgacttcgagctgggcgtcatctccggcatgggcttccctggctacttcctcatcgtgcaggacttcattgctgccgcccgtgacatgggcgtctttgtaggccctgggcgtggatcggccgcaggatcagccgtagcctactgcctaggcatcaccgacatcgaccccatccgctatgacctcctcttcgagcgcttcctcaaccccgaccgtatctccatgcctgatatcgacgtggacttcgacgatgacgggcgtgcagatgtgctccactgggtcacggagaagtacggctacgagcgtgtagcccatatcgtcacctatggcacgatggccgccaagagcgccatcaaggacgtcgcacgtgtgcagcgcctccctctctcggagagtgaccgcctcacgaagctcatccccgacaagatccccaacgtgaagaacgtcaccatcggcgcttctctcgaatacgtccccgaattgaagcaggcttcccttagccctgaccccctactccacgatacgctgaagtacgctcagatgctcgagggcaatatccgcagtacgggcgtacatgcctgcggtatcatcatagggaagatggatatcagtgacgtcgtccctctcagcaccgccgaggacaagactacgggcgagaatatgctcgtcacacagtacgaaggctccgtcatcgagtccacagggctcatcaagatggacttcctcgggctcaagaccctctcggtcatcaaggaagccctgcagaacatcaagaagagccgtggcattgacctcgacatcgacaagatccccatcgatgacgccaagacctacgagctctacaccgaggggaagaccgtcgggaccttccagttcgaatccgctgggatgcagaagtacctgcgcgagctgaagccctcgaccttcgaggacctcatcgcgatgaacgccctctatcgaccagggcctatggactatatccccgacttcatcgaccgtaagcacggccgtaagcccatcacttacgacctgccctgcatggagcgatacctcaaggagacctatggtatcaccgtctatcaggagcaggtgatgctactctcccgtgagatcgccgacttcacgcgtggggagtccgacggcttgcgtaaggcgatgggtaagaagctcgccgacaagatggccgagctgaaggtgaagttcctcgctggcggagcgaagaagggctacaaggaggacacgctggagaagatctgggccgactgggcgaagttcgccagctacgccttcaacaagagccatgctacctgctacagctgggtcgcctatcagacggcgtacctcaaggcgaactaccccgcagagtacatggctggtgcgctgagccgtaacctcaataacatctccgaaatcatcaagctcatggacgagtgccgtaccatgggcatccgcgtactcacgccagatatcaatgaatccgacttcaagttctccgtgaaccaagacggcaacatccgcttcgggctcaatgccatcaagggcgtaggtagctcagcagtcgagatgatcatccgtgagcgcgaggagaatggcgccttcgagaatgtctatgacttcttcgagcgcgtgcccatgagcatcgtcaataagaagacgctcgagagcttgatcttctccggtgccttcgatagcttcggcctgcagcgtgagatctacagcgctccgatggagacggggaatgatgattccttcctctctgccctcgtgcgcttcggtcaggtcagccaggcagagcagagcctcaatgagtcttccctcttcggaggcgatgacgaagccctgcagatcccccgccccacgcctccgacgcacttcgtcgagctctcagatatggagcgtctcaataaggagcgtgagctcgtcgggctctacctctcaggtaatccgcttgacccctaccgcgtactcctcgagtgctactgccccgtcaatgcgcagatgatgaatgacccagaggctctcggcgagggccgtcaagtctccttcggaggtatggtgtcgaacgtctttatcggcacgaccaagcgcggcgacccctatgcccgcatcacgatcgaggatacacaaggctcgtgtacgattccgttatttagtgggaactatgtgagctactcgcagtactgccaaaagggactcttcgtcttcgtcgaaggcgtcatccagaagcgccgctacggcgaagagctggagctgaatatccagcgcgtgagcctgctgagtgatgtcatcgaccgaatcatctccagcatccacctgaatatcgatgtacgcatcgtcaatcagagcatcatcagcgagctcggagagatcatatcgaacaatagcggatctgcaatgttatcaataagactctcggatggtacagggcgcaatgatgtcgagctcacctatgaccaaggtatggtagctccgacacctatcctcctcgacttctgccgtcagtacggcatcgagatgacagctaagtagcaagtaataatattagtctcacctataagaaaggaaacaatcatggcattagaaatcaacagccagaacttcgacacgcttatcgccggcgaccagcccgtagtcctcgacttcggtgccacttggtgcggcccctgccagatggtggctcccatcatcgaagagctcgcaaaggaatacgaaggcaaggtcgtcatcggtaagtgcgacgtcgaccaggatcccgaacttcccagccgcttcggtgtacgcaacatccctacgatcatcttcgtcaagggcggtgaagtcgtagagaagaaggtcggcgctcagagcaaggacactctgaagaagtctatcgaagggctgctctaagctccatatccgatagccggaaatagcataagggctgtaccacctgctgggtggtacagcccttatctcttttatagccgaattataccgcctcgaagaagaggcgcagcgaatagctcagctcctcgccaagggacttcccaagctgagcgagaagctccgccgtcgtgcgacacttaggataggcgtccgaagtagggtaagtcgtgcgatgcactgccccaccctcgactgtatatagcccatcgagcgcagggaagagctcgtcgctataaacccaagcacctctaaggtcggggtgaagcgtagcgaaatgctgcaggaagcgaagtggatcgaggaggcgaatcattccccgtcgctcctctcctacccctcgtcctccctcgggacgaagataatagctcaccttcttcgccgaatgggatagctcttgaagcaagacttctcgcaccgcagagcttccgtagatagcttgtacaatgacttcatcctcccgctctacgtagaagagtgcgccattgatcttaccctccgtcgtacgatgctcacgaagcacatagccctcactggtcggatagtcttcggtcactacacgccagagcgcaggagtatgcaggagctgtggcgccttgcttttgcgctccacagctgtgaggtattcgacgagcgtcgccccctcacattcgggatcagactcagagagcacagcttcgagggaggttgtcgtcacagcaacaggaatgggagcatagcccaccgccctcgtgtagtaatcgaagagccaatcctcagcaggcaagagaagtgaagcgacatcgccacgctcttgcgagagacggagagccttcttcagctcttccttcatcaagccacgtccagcgtagtcgggatgcgtacataccgccacgacatagctcacgggtaggcgctcatcccccgaagaaagctctacggggagatactgcagatgcgtcgtcgctacgccctcggtatagccgatgagcgtgctgtcgtcacggtaaacctcactaaagtacgttgagaggaaggcatccgtatccccgaagcaaagctgccaaaggcgataggcatcccgtaccttagggctcagtggggcattcatggcgcaggactgcagcgatcttctgcaggatgatatcaggcttgtaggagagcttggccttgcggagcccctcgatacctaagtcctcctcgcgattcacataggtgtagcgctcggggatcgtcgaggcgaagagcttattgatcaccgtgaaggcgccgtcatagtcacgattggccttctcgatgtgcacaccgaaggtcgtctcattgatgggcgaaccgatagtgaaggcgacgatctgcccgccgacacgcaggatgccgcccgagagctgcagttcgtcgaaggaagagaggagacgcaggatgacctcctgctccttgtcctcgccttggtcttcgctgccgtgctgctgcagccacgctttctcgacctcaaggcactccagcgcgttggctcccgtgatgggttcgtagctgaaatcagggtagagcttctcgaacttattgacgtgattgcgcttcgactgtagggctttccccgagagactgaccagacgctctctcaggtagatgtagtccgccgctccttcgtcttcgaggaaggtgaaggcgccagggcaaagctcctcgagatgctcccgacaatgtggcgtgatccccatcacgacgagcggatagccacctgcatcggcctcatgacgtagccgctccagcgagtcgatgacacagcccccaccccgacgaatagggataaggtatgctggatgcggacgtgtgggcgaggcgaagcgaatgaagagcgtgtcgtcagctatggcgtagctcgtctcatacttcacagcccagccgaagaggttggcgaaggccagatcgcatatacgtgattcgctcgcgagcgtgtaggcagtaacctccgctcgcgaagccgctgtgatgggggtaaagtgcaataaatccatatacattgaatagcttgggaccaccgcttcagcatgccttgtggtgtgcttcctgacgatggtcccaaatgttatattactttcagccgaatgttatattactttcactcaaaagtaatattacttttcggcaaaagttatattacttttcctcggaagctatatgacttctgatccgaggtgatattacttccggcagaagggtatatacccttcgataaaaaggtatataccttccgaccaaaaggtatataccttttcgctgcgaggtatatacctttctcgctgtacttatataggtgagtgaagaaggccttcggagaagccgtgccttctcactacttcgcctcgccgcgcgtcatgcggaaggaggccttgtagcacatgaatagcgggatggcgacgcccacaccgagggcgaacatcgtcagcagtgccgtgatcgtatttgagatgatgcccggcagatactgctcctgcgctacctcctgcgtcgactccatgaagcgaatcgtacccaagatagagcggtaggcgaactgccctgggatcataggcagaagggcggggaaggcaaagacttcgatcgggtagcgcgcatgataggcaaagcccacagcgatgaagccagcaaagaccgctgcgaagaaagtcgcgatagcgatattcatacccgcgtaggtcatcagcgagaagcgcagggcattcccacagaaagcgatgatcgggacatatcggaaggcggccttagacggattgccaacggcggcgaagcccaaggcagcgatggcagcaaagaagcctttctcaaagataaggaggaagtccatagtagcgtagtcctatacgattgcgatggtgatgaggggttagaggagcgagaggccaagggacatcagcgtgacagagaggcctacggtgatgctcacgacgatcatcaccgccgtcaagaggcgtgagatcccgttgaggatatagccatcgaggacatccatcataccattgatgaaggggacgccagggatgaggtagagcacactggcgctaagggcaatcttgggaaactcttcgcagccgaacttcgcaccgagaccgacgacgaaggatgcgacgaaggccgagaggactaccgtcagatagtgatagacgtgacggcgattcagctcctgacgcaggaggaagccgcagaaggtaccgaggaagacgaagagccccgacatcagatcgccaccgaagagcaggcagaaggccatgttcgcctggctgatcagatagagtacaagccagcgattcatcggaggtgtatcgaggatcttttggaagcgctcttcgagctcgtcgagacttgggtgattatcgtaggtgtaccaagatagacgactcagctctgcattgaagaagaagttcagggggccatgtctatgctgcagcatcccagatacaggatgcgcatccagcggacgataggagtgacgaccatcgcctaagacaggagtaagtgtcatcgtcatgttgcgctggaaggtcatgatcgtcggctcgtagccataggcatgggcgatacgcgtcgtattgactacgatacgattggtctgcacgccgacacttgtctgcgtcgtggcgtagcgcaataagaagtccaagagacgctccttgtcgacatcctcacgcagaggacaaggtttcgattggggcataattaccgtgagaggtgaagaaaatagtaagtgtagtatgaataagaagagcctccactgggattcaggggaggctctggtatcagctcgggctgatcatctttgttgcggaggcaggattcgaacctacgacctttgggttatgagcccaacgagctaccactgctccactccgcgctatctttttgcactgcaaaggtactacatttttcttaataaccaaaacaacgtaaaaaataccgttgcacgacagcatcctttcagctggtttttatctccattttctccacgcgcgccccctgcttcaggtgctactttgcagtagtgcgataatgatggccagtgagcaatactaatggcaaatcaatatcaacctgcgaaaggatacaatcacatctgggagggagtagaaagaaccgctatctcatcattctccaatctcactcaggaacgtcttcgcctcctcacttccttgggcacttgccttcctcagccaaacgagagcttccttgtgatcgggcttcacaccaagtcctttatacataaagtaccccaagttgaattgtgcatcaacatcaccttgatcagcagccagacgataccagtggacggcttctacatagtcctgagggacaccccgacccgagccatagcacgtgcctaaattattctgagcagcagcctccccctgatcggcagccaaacgataccagcggacagcttcggcatagtcctgaggtacacccttacccgagtcatagcaaacacctaaattatactgagcgaagggatgtccctgatcggcagccagacgatacctgcggacggcctctgcatagtcctgagggacacccttaccagaggcatagcaagtgcctaaattattctgagcttcagcgctctcttgatcggcggccagacaataccaacggacggcttctttatagtccaatggaacgcccacccctgcttcatagcaagtacctaaattattctgagcatcggcattttcttgatcggcagccagacgataccagcggacggcttctgcatagtcctgaggaacaccccgacccaactcatagcaaaggcctaaattatactgcccagaggacagtccctgatcagctgccagacgataccagcgagctgctgctgcatagtcctgaggaacacctgtgccagcatcatagcaactgcccaaattattctgcgccgcagcatatccctgattggcagccagacgataccagcggacggcctctacatagtcctgagggacaccagccccctcttcatagcaaacacctaaagcattctgagctatagcacttccttgatcggcagccagacgaaaccatcggacagcctctgcataatcctgagggacacccgtcccttgagaatagcaaacgcccaaattatgctgcgcgtaggcatctccctgatcagctgcccgacgataccaacggacagcttctgcttggtctatagcaacgcccttaccctcatcatagcaaagagctaaattaaactgcgcttcagcatccccccgatttgctctataatggtaccagtagaactcaagctcattggagaatataaacatcagaaggatgagagctaccccaagaatgagcaccaccggtttccaccacttcagcttatttgcagttgggaaagaaggctgttccgtagaagtatcgagattagacatagtgcgaattatgtgtgagataaggggaagtgaatgatggagcgtgacacgctccttttgtaagacgagattggtagcacatctcagcgacctctgcaaagatacacactttcgtataccagcatttggggcgtagatgctaccacaatagagtcgctctacctactctccactcctatctcaacagcataataggagcctttagagagggtataaaaagccatgtggctgcacacctcgagcgaggagtgcagccacatggggagataagtgattagcgcggggaggcgccgatagcttagagagagtcgggctgtgcagcgctagcagcagagaccttcagcagctcgatttcgaagaccagcgtgctgaaaggagggatcttttcgccagcgaagcgagcaccataagccagctcctgagggatgacgaccttaaccttctcaccgaccttcatcagctgaagcatttccgtccaacccttgatgacctggtcaacgcggaactcagcaggcgtaccctttgattcgtcgaagaccgtaccatcgatgagcttaccgacatagttcacctggaccatatccgtagccttaggcgtagcaccgttaccttccttgaggacctggtaagccagaccagaagcagtcgtcttcacgccagcttccttcttgaagttagcgatgaattcagcacccttcttcttgttctcaccgtactgctcttccatctgcttttccatttcagcttcgtacttagcgcgctctacttcctgcttcttttcgtagtaggactgagcgatagcgccgaggctgtcagcctgcttagcacgagcagcagagtcgaggccgagcgccttcttgaagccagccatgaaggcagccttcttcagcgtagagtcgtccttgaagcgcatagcagcctggacgccctgcatctgaccgacgtagtaccacagcttggtcgtgtcgctgttgaagccttcttcgaagcccttgaagaagagtgcagagtctacgttttcaccctgagcctttgcgccctggatagcgttgacgagctcggtagcattaccgaaaccgacagcgaaagatacgctatcagcaccatccttaaggtcagcagagccactcttagagcaagagaagataccgagagccatggccgaagcagccaggagcattgagatctttttcatttttcttttgatagacattggattgatattctgttgttacttcttacgtttgactgccttgcgaggcttagcagccttgggagtagtagaggaggaagcctctgagacgtgctcttcgctcgaggaagcagccttgaagggacgcacgtcgatcagctcgacctcgaagaagaggggcgagccagctgggatgacaccgctgacaccacgatcgccataggcgagggaggccgggatgaggaactcatacttcgagcccttcgtcatcagacagataccttctgtccagccagcgatgacctgcgagagggggaagacggcgggctcaccacgcttgtaggagctgtcaaactccttccccgaggggagcgtccccttgtagtggacgacgaccgtatcctgtgccatggggcgagtgccctgtgcggcacggagcacgcggtactgcaagccgctctcggtgaccttcacaccctccttagccttgttggctgcgaggacggagtcagccgaagctgccgtgcgacgcgtctcagcctgctgcagatctgcagcatactcgtcgaagatcgccttagcaacggatgccgagaccttcgtagagcgcccgaggaggacgtcaccgaaggcagcgaggatctgctgacggctcagcgtgtcgccaggcatacgggagaggacttcggagaaggcctgcccattgaggacgccgaaggcataggagacactatcctgacgggtagtgagagcagcactcttctgcttgctcagcttgggcgagcaggaggcgagtgctacgagaaagcctgccgacagggcaaggtgcttggtaagctgcttcatcccttacttaccgacgataccgatgagctcgatgatgaagatgagcgtgctaccgggctggatcatctcaccagcaccgcggtcgccataggcaagatccgaggggatcgtgaccttccacttcgagcctacgggcatgagctggaggatctccgtccatcccttgatgacgccctgcagggggaacttagccgtctggccacgatccatcgagctatcgaagacctgaccattgatcagcgtaccgtgatagtggcactcgaccgtatcggtgagctcgggcttgggaccgtcacccatcttgatgacctcatactgcaggccgctgggcagggtgacgacacccgtcttgtggccgttgatcttgaggaattcttcgcctgcttccttgttctgctcgacggccttgcgacgtacttcctggaagtagtcgttgatgacgaccttagcttcgtcgtaggtcatctgaggctcagcgccttcgagtacgtcacgtacaccagcgaggaagtcttccagattgatctcatcgaagccagaggcacggaagttctggccgatgctcagcccgagggcatagcttactttattcattgtacttaatagttgttgtctgtgatgtggggagtgcatctcgtagcgagatacaaatgcatatcagaggacaaagttagtcatttttgcatggttgcaaagcaggcagagagctgaaggaagcagggggatgaagcaagctctacgatagtctccagtaccaggtcatacggcacgctcccgagcgactacacgaagcgggcaaatcaacctatataggtcactgctcggaccaatataggtcgccacacctacctatatcccccactctatcccgccctatacagatacacttcggccccgccacatactacgccttagagcggtagatatgtggcggggccgaaggctatatcggggagtctttactccaagggagtcggactacatcagtgccgtgatggcagctgccagaccgaagacaataccgggagcgttagcgatcacgataggccagtcgcgcttaggctgctggagcaggccgtagaagacccagagggtacagttgatcgctgcgacgagaggctggatccagtcccccttttgaccattgaggttgccctggatcgtgctgatataagagacatacataaggatagcagccactgaagcgacggtacccaggatggtgaggaacttactctttgccatatacttcttaggatgaatgaatacaatcttatcggatgcaaaagtataaaaactcttaaaaactcgcatccttccgctctgccaagccgcttctccagcaagatcaccgaccacgacagggccaaaacagcaggggctacgcctgcacagcttacgctgtagggcatagcccctgagggttattcccgcctgagggcgggtatcggttggtgacttacttctttgcgaggtcgtactgggcagcgagctcaccttcggggagctgcttagtcgtctggtcgagcagcgtgatcttgccttcacctaccttgtagtaggtctcgaggttggacgaaggcgtgatgagcgtcagcagaccatcagcagcgagcttgtaggtcccgttctcatcgatgggctcagcgcctgccttcgagaactcttcgtgcttgctgtacgtgccgtctgcgttgaggacgatggtcgtcttcaccgagccgtcagcaccagggatcgtaccttcgtaggtacccagtgcagcttcgttagctacgttagcggtagagtctactactgcagcagctacagagtcctgattcaggctatcgctctgcgatgcctccgtgttaccttggcaagaggccagtgccagtgccagtactgcgaatgaaacaaatactttcttcataatcgtactatgtgtgttggttagtcgagcgccccgccagcgtcatgccgacttatcagacactcgaactggctacaaacgtacaaaaaaatactattcaatgtacaatgccctctgactactcttcggacaaagcatcaacctcagcgagccaagcattggaagacacgtcactgggcatacgccagtagccacgtggcgagaggctcacagccgtcaccttaggcccatctggcaggcagttgcgcttgtactgctgggcgaagaagcggcgatagaactcgcgtagccagcgcttgatggacttcgcatcgtacttatccttgaaggccaccttcgccatatagaagatcttctgaggtggatagccgtagccgaggaagttgtagaggaagaagtcatgcagctcataggggccgacgacatcctcggtcttctggtcgatatcgcccttagcattcgtaggcttcagctcgggagagataggcgtatcgacgacggagcgcaggaccttcgagagctctgcaccgaacttcccgatctcagccatacgcgagacgatgatctggatagccgtcttggggatacctgcattcaccgagtacatcgacatgtggtcgccgttgaaggtacaccagccgagagccagctcggagaggtcacccgtaccgatgacgggagcgttgtacttattcgccaggtccatgaggatctgcgtgcgctcacgagcctgcgtattctcgaagacgacgtcctgcacctcgggatcgtgcccgatagcagcgaagtgctgcatacaagcctcggtgatatcgatggtgcgtgacgtgacgccaagccctgccatcagctcaatggcattattcttcgtgtggtcgctcgtacccagcccaggcatcgtcacagcgatgataccctcacggggaaggcccagtgcgtcgaaggcagccacggtgacaaggagtgccagcgtcgagtcaagaccacccgagataccgaggacggcatggcgtgccccgatgaagcgcaggcgctgtgagaggccacacacctggatgtcgaacatctcttcggcgcgctcatcacgcttgcggctctcggggaggaagggattctgctcgatcttacgatccacatcatgcgactcctcatgggtgcgcaggcggaaggggatctctgtcaggaggccacgctccgtgtggtcgacgatcgagtcattgaagctattggtcgtcaagcgatcgttatcgatacgcatcacatcgatatcgctgatgatcaggcgctcttcgtaggtgaagcgcggagtctcgatgaggagcttaccgacctcggcgatgaagcccttacccgtgaagacggtatccgtagagctctcaccatagccagcggaggcgtagacgtagccgcagaggttctgcgaggagagcccgctgatgaggctacgcaggtaggtattcttccctgccagctcgttgctcgctgagaggttgaagatgatctgtgccccgtagagtgccaggcgcgtccctggggtgtagggcgtccacatatcttcgcagatctcgataccaatggtaagcttgcctgagcggaagaggacgttgtgcccaataggcacctggaagcggccgatctgtacgtgggcgagcttgaggtcacgcgcagcagcgaaccaacgtgcttcctggaactcacggtagttcggcagataagtcttagggatagcaccgaggatctgccccgactgaagggcaacagccgcattgaagagctgtgactggatgcgtataggcatacctacgatgatgagcaccgaggtgtgtgccgtacgctctgcaaggcgaagcagcgcagcctcggcctgatcgttgaggaaagggcggaggaaaaggtctccacacgtatagcccgtgatggaaagctctgggaaggtgatgatctctacacccttggcgtcagcctccagtaccagagcctcgattcgctcgacattgtactcgcagtcagcgacccgcacgaaggggacagcggctgcgaccttgacaaatccatgcttcatattacattgcttttatagagacgatatgcgtgcagcccctgccgaggatacacgcatgccgtctatgaggcctccccacgctcgcgaggaggatggtgattactattgtccgagagcggccaccccatgctgtaccatggcgatgacttcgatcagattctttgtgatgaacttcaccgagatcgccaggaggaccaccccgaagaacttacgtaggatgtagaccccattcttaccgaggatacggtcgaggagcgagacatagcgcaggacgaggtagacgaggaccatgttcagtacgatactcagcgccagattgatcatcgcgataccagccgagcggagcgtcaagagcgtcgtgaacgaggctgcccccgcaaagagcgggaagaccaacggcacgaaggtcgtattgccactcgagtcgtcctcagacttgaagatctcgataccgaagatcatctcgacggccatcacaaagagcacgatccccccagcgaccccgaaggtcgagatatccgcaccgaaagaccctaagagcggctcccctacgagcaggaaggcgatcaggataatccccgaatagatgccgacctgtgcggagtggtaggtcttccccttggccttgagcgaaaggataatggggatagccccgatgatatcgatggtgacgaagagcgtgaagaacgctttgtagagctcgtcgaggctgaagagggtaaactcatgccctatcgctgaggcgatctgaccgaggtctaccccgagaagtggagtagtcatcattacgtgaatgagcttagagagtagtgtatgtagcaaatagcgaggggatatccctcctctggaaagaaggataccccctcacatggtgagcggtaggcgaggctcgaactcgtgaccctcagcttgggaagctgatgctctaccaactgagctactaccgcagggttaagacccctcaaggggttttcttgtccgcaaagataggaagaacttttgattctgcaagaggatttcacctgtgcttccgcctccaaatccgaggggtatattgaggaaacatctaccatccgtcagtaggactgcccgcatctggagaccttgtagccacgctcctctacagctcgcaattccataatccataattagagtgcatcataggtgaagctcagggagtccgactactcgttattttccttgtcttctaccgctttgctcagcacccacggagagaggcagaatagagatcgctattcgcgctccagcggattgtacgagcgaggcttcatccgacgaagcgtctccttggagtaaatcaccccagggatttgtcgcatataagcagctggatcacgggcataggccgccttggccttgagataatccagtcggctcacccgctgctcactggagcgaggactgaggtaaatcagttcgcccgccttagcatactccagccccacggcttcgtacacatagtgacgctgcgtatcatagacacaaaggatcagtcccggaaggcccgagaacttccaaggcccgacactaaagggtaactcatcggtataccaagcgatgaagtcacggcctcgaaagtgggtctttgctcggcgacaagggtagtcgaggagggtcgtatctccaggaagcgactcccaccgttgtgtaggaataggctcctcgtagaggtactcatctacgactatgttgttctgctccgtaagcacaccgctcctcatatccgcaaggatcatctgatggtcccgcgcctgctgagagagtgcacccatgtagagcggtaagatctccatccaagtcctcccttgagcggctgaggcatcacgcagcgaatcgatgcgctctgcccccatcgcccactctttcgtcgcatgcgcccccacctgcagaagacgccaagcctcaccctctcgcttcaggttggccgtgtcggggtggtaggtacacttatatagtagtcgaagtttcgcagtatcgatgaccatcttcttcacggagtcgactcgatccgtaccaagcttacccagtgaggacaattcctgagcaaaggccgtagggcaagagaaaagaacaaataaaatgcctgccaatagggtactggcttcaacacatttatgacgaagggaggcacaggtgcgtggggatactgccaagtctcgtggacgagggagcaaagaaaagaggagtttcttcatacgatgatttagattctacggcggcgcagcatacgtcttaatggagattgcgtactccactacaaatataaaaaacaacagccacaccaactcgagactgctgccttagatttctgtcctccatttagagtgctaaggcatcgcacgcccagctccccgatgggcctctccgaagtgacacagaagcccgtcgccttatcgcgcgtattcctcttattcagcggaaggaaaagcgtctttctcgtgaagaaaaaagcgccttcacgtagtgatattcttctatctacgcacgtagtcttaaagaccaagcacgcaaatccaaatatccacgtacgtagatattagatccacgtacgtagtccaaacttatctgccactcgtccacaacttttatccctacgtggagcaataacctatatataggtcgcgtcacaaagctatacggaatcgatccaaagctatatagcattcttcaccatcctatatagctctatccacccatataccgatatgagactattgtgtaaggtctcataaggaacagcatctcccctaccctataaaagagcgcccccgaggccgctgactacggagcagtcagacagcctcgggggcgggtatttagagtggcaatgtgtggggagttacttacgctgctgcgaagtcaccttcaccaccgaatagtaatccgagttgtagccgtggaaggggaacgtgaaggagagcgtgcccttcttcaggtcaatcttcccttcgggcttgacgtagtggccttcggtagcaccgatctcagccgtacggtcttcgtcgatacccgtgttggagaggacgctgtacagctccatcagcccgtcggccgtctcgaccgtctccttgaaggtcggctcagcggcgatcttcgccatcacacgcgtccataccgaggactcgtaggtgaagggtacgacgatgggactgtccggctcctcttcgcggagcggataagtcgcgggcatacccgagagacgcttgcccgtgaaggcgagcgtacccgtggaagcattcacacggacattgtccagcacgacattgaaggtctcagctgaggactgcgtccagttaatcgccttcatcacctccagacttgatttcccttcggcatagaagtcgaggctattaaccgtgtagccgtcccagagcttcttatagatatcattcagaccaagggcattgtacgagaacttcagtacgggctggtcggccgtagcacggtcactcagctcgacgagcatcgtgacaccgctgatgcgccaggtagcctgcgaatggatatccgtaccatagtcgtattcggtaaagcccgcccagtcgacactcccctcgaccgtatgatagccaaggatcgtggagaggtcgatgcccttggcacgatagtcgtcgatgagcgcctgctgagcagccgtaggcgtccacacggggaagggtgagatcgtgatcgtcagatcgccctcgaccatcagacccgaggcggcggacgtgacggagagcttggcctgctgctggctcgtcacgcccttagccgaaggcgtgatgacgacctctccctcgagctgacctgcggggatcgtaagcgtcttcgaggagagcgtgagggatgaggcagcttcgcccgtgagattgagctgtagcgtgaccgcgtccgtgcgacgagaagtcaggcggacggtcaccttaataggagaggtagaggtcgcaactatgagcaccgagcgagagccgtcgggcagacgcagctggatcttattctccccacgatacttattgtcgggggtatctttcgcacacgagggaaggagcgataggaggagcagggagaagagcccgatggccccgatgctccgtaagcgatgataaagggaagtcttcataatggagatacgatagtaaaaggatgagatcaatgggtgagctcaggccacccagggttctgtgccccgaggttcttattcgagcgctcggaggcgggcagtggcagggtacgcttgtagctccctgctggcagtgtgagggagacgcgctcctcattgggggtatagtgctcgataggcagtcccaggcgcttgagatcaaagaagcgtaggccttcgccggcgaactctcgcgccttctcggcgatgatagcatcgataagagctgtacctgtcacggtcgaagcgacctcatctgcaccgaccagacggaggtaactattgaggaggtcgcgtgcagccgtctgatcaccactgcgagccaaggcctcagcacgcaggaagataggctcggtcgtgcggacgacacagttgtaagaagggagccctccagcgaagaggaaggcggcatacttcccgatgatctgcagcgagcgggtcgtggtagcatcgacctgcagcgtgctgtcgagggcatagctgcgatgacggaggtctgtcgaggccaagtagctgcgctggggaagctggtaggtcgcattagtagccgacttcgcctgagcgtagatactattatagtaggtcacgggcaccgaactggcgaagagggctacagtagatgcgccctgcgaccaagcaagaggtgtcgtggggaccatcgacgcggagagcgtcgcggggacgagtgtgcgggtcacctcctcggccttagcccagtcgccagcatagagatagaggcgagcaaggagtgcacgagccgtagcggcattgacgaagcctggggcagagccgtagggcgggcgcgtcgtcgtgtcgaaagccgtgagggcctccttcagcagacgctcgatagcctgcaccgtctcggcctttgtgctacgtgggagttcctcacgctccacacgatccttgaggatgatccctcccgtatgctcggcatcatcatagggtgtagcgaagagctggaggagctggaggtaagagagcgccttgagggtcttcgcctcgcctgcgaggtagtcgagctggagctgctcagcagaggagaggcgggagcggaggtcggggagtcgaacgagcacagcgttcgcatccttgatggtctcgtagtagcccgaccagaggtcagaggccagactctgcagggcatagtcggtataggcatagagctgcgccatctgcgggctttggccggcacgatgcgtgggcaccagttcgtcagagaggagactaagctcgagctccaccttcggataggagctataggcggaggcgagcgcctcataagccgtctgcacggaggagattgccttcgggtcggtcaactcattctctacggggatatccagtgagcaagccgagaggaagggcaccacagcgaggacagggcagagcatccgtagcacagagcgtcggagaagcaaggacatcagaagttgagattgaggtgaagggtaaggacgggctgcacaccgaggtcataggtacccgactcagggctaccgcccttgtatggtgtgagcgtgaagaggttcgagccctgtagggctatcgtagcgtacttcacggcatcgcccagatggtgcagcagcgatgaagagaggcggtagcgcaggctcagcatcgagagacgcaggtagtcactgcgcgagatcatccgcgtattgggatagtgggagaggttgttgaaggtctgcgtccccgctcgtgggctgggatagaggcgatcttcgtcaccgagggcgaaccacgtgcgggacacctgccctgcgatggcattcttatttacatcggagaccccacgcacgtaggtcatcgagtaggccttgaagcccccaaagacatagtagaactgcgcatccagctccagcgccttgtatccgaaggtcaggccgaaggtacccgtataaggtggtgtacggtagccgatacccacgaggtcatcgcgcacgatcgtcttaccgaagctctgctctgccccctgtcggtcacggaacatcagttcgcccgagagtggattgactccgagggcatccagcccatagacatagtcataagagcgacccacctcgtagtcgggatagacattgtcgcccgaatagatggcggtcttcccatagaggtcgagtaccttactgcggttgtaggccaaggctgcacggagcgagaggcgccagtcttcaccgctaagaaggcgagacgaagcagagagctccacaccttcgttgcgcagactaccgacattatccagcatcgagaggaagccattgctcgctgggatatccgtcatgatcagggcatcctcagtgtctcggcggtagaggttcacgtcgagcgtatgggcatgagccagctgcacggagaggccgaggtccacactcttgagttgctcaggcttcaagcggtcattgtagagggtagagagacggatgaggcgatactgatctgcgtaaaaagagctctgctggtaggagaagatgggcacagctgaggctgaggtaatccccccgaggcttgctgtcagcccccacgaagcctttagtccaagccccgtcagtaggcttccaccacgtaggaagggcagaagctcctcaagatgcaggcctccaccgagtgcccacgcggtattccagcgcttgtcacggggcaggaggcttgaggcatccgccttataggcagcgaagagatcaagcttcttatcgtaagtataacccgtagccagcccaaagcccagctgagcggatgtggcgttagagccggagaagtcggggcggaggtctgctgacgtgaggcccttgttcacccctgccagatactcctgcaggccgataccatgccccgtcaccgagagcagacggccttcgctgtagtagtagtcggtattggcagaaatactaaaatcgtgcttctcggcgaagagacgctggtaggtcgcacgaagattggccgagtagttgaagtcggtgttcttgcccacggagatcatccctcgctcgatgggacggcgacgcgtcacctcactataggccgtggcgggagtgatctgctcactctcattgagcacatagtcaagaccgaggacagcatccagctgcatcccctcgaagggacggaggttagcactcaggcttgcaccgaagcggacctccttcgtccagcgacggaactgccccgtgaggtcgctgtacttgcgacctgggtaggagaagagttgctgcgagctcttcgtctcatagggattgagctcgtagaccagctgctgggggctgaagtcgctgctattcgggctattcgtcttagcatagcctcccgtgaggccgagcgagacgaagccgaggcgactctgccagtcgaggctattagtgagagtgaagcgcttggtatcgttgccctccagctgcccaccttggcgggagaagttgcccgagacgtagtaggtcacatcttggctcccaccacgcaggctgaggttgtggctctgataggaattggggcgaatgaggtcgtgccaccagttcttatggatctgacgcagggaatcaagctgtctactcccgtaagccagatactcctctcgcgtccacgtcggggcgataccgagtgtcgactgatagctctgacggaggtcgctgagcgtcgccgaggagatgaagtctggagagaagagatagcctggcgcagtggtcacctgcatacgtcgctccagatcgagcttctcatcagtatccatcatcgtcgtagtctgacgaccgcgtagcgtgacacccgcctgcgtactgaggctaatcgacatagggcccgagacaccacgacgtgaggagatctccagcacgccattggcggccttcaccccatagagcgctgtcgctacggcatccttgagcaccttgatctcacggatatcgagcggattgagcgtcataaaggcctgcggagagatgatcttcccatcgagcacatagaggggttcattggcagcatcgcccttggtgaaggagttattgccacggatacgtatctcgggcttcataccgagctcgccacgattgacgacagtgagaccaggcacagcaccctgcagtgccagcgagaggtcgatcatcggcttctgtgcaaggagcttcatatcgacctgtgccacgacacccgagcgggcacgtaggtcaagggcattgatattggggcgggcacggacgacgacctccttgatctccccgacggcatcctcgaggacgacacggagcggatggccttcgacgaaggtcacttgctgggtcttctttccgacagcggagagggtgagactcaggcgtccaccctcgggtcgggaggcaagggtcagcgtgaagcgaccgcctgcattggtcatcgtcttagcattccctgctcggacgatcaccccgtagaggggactaccatcccgctcaacgacaaggcccgtgatagtgaaggccgtcgtctgctgagaggtctgcgcagcagcaagaggaggtagagcgagccctgcactaagcgtcaggctcgtcaagagggtcagcaggagcttggtctgcggcatatatgagggtaaagggaactacttcgactcagcaggtagggcgtcctcggggacgtagtagacttgaccatcctccatctcataggcgacgccgacacggcgaccgcgggagctggacttatcagtcttctcattagagggggtatagcgctcgatcttaccgcccttcttcgtgatgatctccatattctccttccctggattcttcaccacagagaagtcctcctgcgtaaagacctcggtcatattcatgttcatcaccatagcgaccataagggagacagcgaagaccatggatacgtcgaagaggttgacgacgacggtcagtgggtcggtatcttcaccctgcatgagcttgctcgggcggcgtggcttgcgttccatagttacttcgtatggctatcaaggaggagcgaagagatgtagtcgaagagtgctacatccttggtataccaacgctgcttgtactgtagagtcaccagaccagccaagctgatcaccagaccgacgacggtggtagcgaagacgacctgcatattgtaggccatcgcgccgatatcccccgaggagagaccgacaagtgcagggctcatagcgatgagcgtcccgaccagaccgagcacgggaccgaccttcgtcaggagcttagagagggagaggtccttctcgcagatattctcatagctgctgatgacgtagttcgcatagtcctccgtgaggccttcgcgcgtgagcaagtcatcaagatgatcgataaagggagagcggttggacttaggcaggcggcccgacagctcggagaggttccctgcattcagagcacgcacatcgccgaggagcgcattcatacggcggcgctgcatgaagctattatagaagcccccgacgaggatgagcgaacggataaagaggatgatgaggaagaggatgtcggggatgaggaggctattcgagatgacgaagagtaccttggatatctgatccataagtgcggatatatattatttgtgtttaagtgatcgacggatacggggagcgaagtagcccacgacaaagcacagcagtccgatgccgagggtcagcaccaacccactccactggatgggactctcggtgggtgccatacggatggtctcatcgaccgaagcgatgatcccgaggatgaagacaaagagctctactaagaagagcacctccagacgctgctcttcctcgggcaggaggaagcgcaagaggaaggtaagccccagcaggagcaccaccgtccctgcggcaaggaggagggagacaaccccgaagtccatccctggcagggcgaagatcagcgtcgactgcagatagaagagcacggggaagataagcacccctggatagaggcgcaagaggaaggctatcaccctaccccttcgaccacgtgggtgactcagacgggagaagctataggccacgatgagtgccacatccagcgagatgaagatggctgcatactcacgtagcgagcggtcggcgatataggctgcgaggccggtcttcgtctgctcgatcgcatagggataggtcaagtagacgaagacagctgctacgacagcaaagagtgtggggatgatccagccccgctcaaaggagaggcgtagcacggaggctacgatgatgaagagcaggaggatctggacgaggagttccatcagctacaccgagaagatagaggttagcatcaggggactactcagcatcacggcggcgcttgatacgcaggaggacgaggagcccgatgaagaggacagctaccccagctacgatccacagaccattgaagctacgcgtcacggcaccagcctgatcagcgaccgtctccttcttcatcaccataccattctggctgggagcatcggccgaagaaccttcgtccatctgcttcatctgagcctgatactgcttggcggcctcgggagagagctgctgggagatgaaggcacggagcttcttattgtctgccgacataccaccacccgaagggccgtacttagccacgagctccgaatggcgctgagcgagcgtagagagctgctcgggtgaagccttccacatccccttacgagccgtctcaagcatcacagcagtgatctcctcgagggctgcggggctcttcccttcgaatgccgaagcgacaccgagattattgacgtcgcggatatacatatcgtagagctgatcccagagctccttgtcgatgacctcgggcttcatcacattccacccgtaggtattcgtgacgacctcggtgatgttggcgacgctgttagcgccaccagcgaggacctccttcacgtactcagggttgaggacggtagcacggctctcgacgccgatagcctccttgaggtcctgcatacgcatgttgctgtggttgcggtagtcagcgagataggtatcgggatccttccccgtgacattacgtaccgagagcgtgaggccacccatgaactcatagacgtggtcgaggctcagtgcaccccaagtattattctgacgtggctgcacgacgacatcggtattcttgagtgcagcacggaagagaggcttgacgaagcgaccccagtcctcctgcttaccggtgtaggcggcacccatattattcagatagacatcggcgatctccttctcttgctcccacttgtctccagaggtgaccatctcctggatgccggtaccatacataccattgataccaccgaagatgcggacgttcgccagctcacgagcttccttaggcgaaaggccctgctcgacgagctccttctctgtggcgacagagcctgcagcgacgtagttctcctgatcttccttgccgagagaagcgaccagctcgacggccttcgagatcagcgccaggcgcgatgctgcgaggtcacggaactgtcctgaggtctggatgaccacgtcgatacgtgggcgacccagctcggaggtggggatcaagcgaacatcctcgaccgagccaaactgcgagcgcacgggctcgaccccgagcatatacagcacctgggcgatagtcaccccttcggtctcgacgaattcactgctccagaaggtatagctgacctttgtgggatacttgccgtgctgctccttgtaggccttcagtgtagcctgagcgagctgtacgccctgactccacgcacgctgcgaaggtgtgctctcagcacggaccgaatagaggttgcgacccgtaggtacagcctgtgggttggcgacggcatcaccacccgacgagggtgcggtgaagcccccgttgagggcattgatcgtagcatcgagctcgagacgagggctattctgcagggcatcacgataggtgatgacgttgaggatggcacgctccagctccgtgacggcctccatctcatcccgctccttcttcgatggctcgggcgtgtcggcagcgtgtccctgaggcttcccccctgggtgcccaccaggatgaccaccaggatgacctgcgggcttatccttgaggctaccgccacggatctgatcaaggcgagtaggcttgcctcccgacttactgctatcacccttggcagcagccatagccgccttcatacccatgggcttcttgggggcagcgagtgcatggatgcgctccagctgctccttcgtgatgctaccataggagaggacggtagcttcgctcaccgagcccgaggcgaggatgccacggacgagctgctgagcgggctggaggtactccttatagaagcggtgcttattgcttgtattgtcgatgggctgagcagcacgcaggcgatccagtcgagccttggcgtaagcgatgggatcagccgtcatcgccagcaccgtggaggtcgtcttcgctggggtatagggcacgcccgtgacatagagctgaccattgaccttctctgaggcgatctcctcggcgaagttgtcgatgcgctcaacatccttagccgtatagggcttcgtgaggatggagtctaagcggagctcacgatggataccgaggccgacagcgagcttcttcaccgccaggctctgcgtgtccttcgccgcaggctccttcagctcgtagtacttctcgatggcctgctgcaggtcggtgaagatatgacgcgtcttgctctcgtcgaagggaggggtgatataggagatgaggctaccataagagcgacgcttagccatcatactctccccgatattcccgatcgtataatagtagaagtgtgggtaaggtgcgatgagtgcttcaccccagtcattggcgctgagtgcgacctgcttcttcggggtgaactccaagctcccatgcgtaccgaagtgcatcaaggcatctgccccgaagacgtggcgagcccagaggtaggcattgacatagggatagggaggaggcgaagcggcaccgtgcacgatagcgaagttgtcactaccgatacccgctacaggctgagggagcaggacgacattgccgtactggatgcgcgtagcagcaagctgtggtgtaccagccgaagaggtacgggtcatgtagctccctggcgtggggccgtaggtctcctccagctccttgatctgaaggggcgtcaggtcttcggcgatccacttatcgaagtccgccttatcgacccaagccggattacccgtcttgaggtattcctccatctgcccaccagcgatggactggatgacgggaccttcgcgcatcagctgtgcctcgaaggccttcacatccgtagggagtcccgtgaggttatagccctcagccttgagacggagcaggaggttgtagagcgagggcacgacttcgataccctgtgctgcgagcgtctcctgccctgggcccttgaagtagtagatagcgagcttcttctcgctattgggcttggtctgcagggtgaggaagcgctgcaccagctcagtgagcttcttgaggcgctcgggtacagccttgaggacgtagagcccgtcgtcattcttctcctgcgtagtgagtacgtagggataaatagctccatcaagctcgggcataccgagggtctgtgagaggaagccccccatcataccctgcggatcagcctcccattcctcacgactggtcatgagtgtcaggggggcgatgacggggatattacgctcacgcaggtattcgacgacgcgatccccccccatcatcgagatacgtccgtgagggaagtggatgatgaggtcaggtgagacctcctggatgaagcggagacggtcagcgaaggaagagacgggatagacattgagccccgcacggtcgaggctggtgatgaggctatcgaggttctgcttattaccgctgaagggatcgttaagccccccgatgacgaggaccttcttcgccccctcatgatagaagccctgcttcttgatataagcttcgtagtcggcgagtttatcgaaggcgacgtcctcatcaagatggtagtagacgtcggccgagctgggagctaccgaatcaggctcgggagcgaaccacttcttcccgtcgatgtagcgacggatatagtgtgacagagagcggtagttcttcttattcccgttgtcgagatactcgctgatgcgctgatccttagccgcatcaaggctggagatctcattctccttcgtcgtagcatagacgaccttgatagggaggcccttatcacccagcttcttgatctcggcacgctgctcatcattccacttgaggcccataccgaaggccaggacgcagtcgtagctgtcgaacttattgatatccccctgctccagctcgtcatagcggacgtgcttattgtcgttggagaggatgatccccgaagactgatagccggggaagttcaccagggcgatgcgcgtcgtcgacccatagcgtccccagacaaagtaggcgacgagggcgacaagggcgagggcaatccctccgaagaggaagcgacgcaggcgcttactacgggatgccgatttcatgtcactcatatagcttataccttatatattatctctgcttcatgttccccacagacccgcatagacacaggggtggaaattagcaggcaaagttataggctacaaggaggcgagtaaatacctacgaatagggatttgcccccacatagacaacctatatataggtatagacacagcttatcagcgttaactctccccacatctaatgagactgctgcggcagagtcctgctctctatttattgtgctaaggcatcgcacgctcagctctccgatatacctctccgaagggacacacaagcccttcgccttatcgcgagtattcctcttatccagcggagggaaaagtgtccttctcgtgaagaaaaaagcgccttcccgtagtgctattcttctatctatgtacgtagtcttaaagaccaggcacgtcaatccaaatatccacgtacgcagatttatcgtccactcacgtagaccaaacttatctgccacccgtccgcaacttttatccctacgcggagcaacggcctaatagaggtcacttcacaaagctatataggaattccaagcaaagctatatagctttcttcgccatcctatatagctctaccccacgtactcatatacctatatggagaccattgcgcaaggcacaaaaaagccccaccgatcacaagcggatcggtggggcgatggggtgtggcctacacgaaagggtagccagctacttgatggggacgtggagcaccttgcgctctccgatgaagccctcgagggtctgcccgatagctatgggtccgacacctgcgggggtgccagtaaagatgaggtcacccatacgtagcgtctggaagcggctcacataggcaatcagcgcatcaaagctatggatcatctccgagctatcggcctcttgcaccacctctccgtcacgccgtagcgagaaggcgatggggcgctcgggatagcccagagccgtcttgtccagccactctcctacaacagccgagccgtcgaagaccttagcctccagccacggacggccctcagccatagcgcgtcgctgaatgtcgcgtgccgtaaagtcaatgcccaccgtcacacgatcatagtagcgatgggcgaagcgctcagcgatgcacttccctacccgactgatctggatgaccagctccgcctcatattcgatggacgaacccatatcggggaggaagaagggcgtgcggggcttgagcagcgcatcgcccttgtggaagaagagtggaggagtatctaccgcctgctcaggaaggccgagctgaggtgcttcggctacgtgcgggcggtaattgaagcctacgcctaagatcttcatcggctggagcgaggcttactggtaggggtagtaggtagactttcctggagcgccttcattcgggtgaacatcagtgccaggtgcgcatacatcgaggtattctgcacgacgacgtgatcgggcgtctggatgcgaacgggcgtaaagttccacagcgcacggataccagcacgcaccaagcggtcagtcatcagctgagcttgtaggataggtacggtgaggatggcgatcttgatgccttcgctctcaatacgtgtcgccagctcatcgatatgatagacggggatccccgagacttctgtaccgatgatatcctcagcgacgtcaaagcctgcggtcacctcaaggccgaactgccgtagccccttgtccgaaaggagcccagagcccaagctcccgacaccgacgaggaaagcctgatgacgcttcgtgaagccaaggaattcctcgaggtagttgatgagagcctccgtctcatagccgacgcgcgtacgcccctggagctctacatacgagaggtcctttgctacgagcgcagcatcgactccgacacccgaagcgatacggggcgaggagacgtacttatgtccttctgtttggagaagctttacaaaggagagataccaagggagtcggcgcagcgtcggctcggggataatcccattgcgcttcttctcgtccttagatttagccatttatagtcgtttaagtaagtgatcttgttcctgatgagtacaaatttacgaattcaatacgaagcctcgtagtatattcctccccgacaagagcgcgacagccagctatccttttatgggatagctggctgtcgcgcttagttaggtctatcgatctccgcagagaagcggagtctattcgtcttcggaggctgatgctggaggctggataccgcctggcagtgccttcttcgtcttggctcccagcgccttcagcttatcgaagcggccaaggatatcgccacgaccatcacggagctggcccttagcttcaccgaacgccttctgtgcatcctcgagcttgctctcgatcttcaggaaggtctcggagaaggtggcgaacttatcatacagcttacccgcctcatcgacgatctgtaagacattgcgctgctggctatcacgctgccacatatcctgcgccatacgcagggcagcgatgaggttcgtaccgttgatgaggacgacattcttccgataggcttcctcccagagcgtggggtcgtgagcgagcgctatggtgtaggccggttcgttggggatgaagagcataacgaagttcggcgaaccctcagtgtactcttcgtagcgcttacccgagagctcattgatatgcttgcgtaggctgaagaggtgctccttgagtgcttggtcacgctctgcatctgtctcagcggcgacatagcgcgcataggcggtgaggctgaccttgctatcgatgacgatggccccccgattggggtagcggacgatgacgtcagggcgaaggccaccgcggttatcacccgtcgtgatgacggctcccgattcgtcacgcagcgtctcctgcacgaagtaatgctctcctcggataagcccgctctgatcgaggatgcgctcgaggaccagctcaccccagtcaccctgcaccttgctatcaccacgcagggcacgtgtgaggctggtagtctcctgactgatctcctgactgcggaggatgagcttctcgatggagtccttgaggttgaagcgttcgcgtgcttcttcttgataggtcttatcgacctgctcaccgaagcgcttgaggtcctcacgcagcggagagagggtctccttcgtgcgcttgtcaaggtcttcggtacgctcgcgcatgatgtcattcgcgacagcacggaagctatcgcgcagctcttcggcgagcttgcccttctctgcctggagcttctccagctcggaggcgaggctggcacgctcggtcttgacggcagcaaggctcacagcggcctcatcagccttctgctggagggcgtcgtagcgctggcgaagctcttgatatgcctcggcagtcgtctggagcttcgtctcaagggccttgagctcaagagccttctcatgctcggcacgctcagtagctgcgactacgtcagtaagttctttgatgcgcttccctgcgtagaggaagagcacgaggaagacgaggcagagtgccccaaggaagtagatcatcgtctaactaataggaaggtaagtggatgtgtcagcaggggaagcccccgtgagatataaagataaggagaaggctcgagacagcaagagtgcgcctcagaaggcatcatcgaggaacgaaagtgccgcctcggacaggggcacactgtgatcgatatgcaccagccgctgattgcgactaccacggaagtagaggcgcgggtcaagaaggctctggacgaaggggccatcgacgagcacatcgataaactccagcgcggggcgatgcgcctctgactgcaggaggtactccaccgtatagcccgtgtagcaccagatcgacagccccgtctcacgtcgcaagcgtgctaagagcgtagcaagcgctgtgggatcataaaagggatctccccccgagacagtgatgccgtccaggagagaattgccccgtatctcctcgatcatatcgctgagtacctcctcggtgaggggaatacccgcctcagccgaccagctctcaggattgtgacatcccgggcaagcgtggcggcaaccagccagatagatcgagtagcgaaggccggggccatcgctgatactctcacgatagacgttgaggaggcgcacggagacgggggtgaggagtgggatggataagacgaagcctggagtccgtcggcggggagccgcctcaggacccaggctcttcgtcagctgcttaatagtatagttgggaggatcagtgatgcttcacacggtcgtgttcctctgcctgcttagcagagttccagctctcgaggctaccggtgagatagcccgtgatgcgacgcagacgagcgatgcgatcgctggcacagacggggcacttatcgtagatgatcccacgatagccacagtcctgacacgtatctacggggtggttgatcgagccgtagccgatacccgtatccttcattgtcttgacgagcttgaggatgacggagacattcttcttcgcctcgccgtcgagctcgatatagctgatatgcccaccgagtgtgatcgcatggaagggggcttcacgacggatcttatcgtgcataccgatctcttcgcgcacgtcgacgtggaaggagttcacatagtagtcgaggtcattgaccccagggataatgccgtagcgcttgcggtccatacgggtgaagcgccccgagaggccttcggcaggagtagcaaggacggagtagttgaggtggtacttctgcttgtattcgcgcaccacttcgttgatcacctgcacggcatcatagagcgtctgccaagagcggtcgctgcgtccgtgcccctcaccatagagtgccaccatcgcattgtgcccgccgatgaagccgataccaagcgtgccgctgtcgaagaccgagcccacttcgtcctgtggagcgagggctgcaccacccttccacacgtcattgcccatcatgaaggggaactgacgagctaaggccgagcgctggtagaggtagcgctcatgcagctggtcaccgatgaaggtagccatctcacgcaccgactcgaggaagagtgcccttgcacgctcctgctgctgctccacgggagccgtagggagctcacgctgggcacggcgagaggcttcgatagccagacgaggcagattcatcgtcgtgaaggagaggttcccgcgcccaacagaggtcttgggcccgcagacattctcgaagacgcgcgtacggcagcccatcgtagcgatctcatgcaggtaacgcttcgggtcatcggcgcgccagagctcgtgctggttgaagggcgtatcgaggaagaggaagttcgggaagagagcgtgcgacgtcgtcttacacgccaagagcaggaggtcgaagttcggcgtctcgaaggtgtacttccccgccagcgcaccagcgaagtctgcctgtgccttcgcatagtcagcctcggagtagttcacaccctccttgaccttgaagatctggatggggaagataggcacctcgccttggcctaagccctcgacagtagcagcgaggagctcacggatgaccatacgcccctcttcggaggtgtcggtaccatagttgaccgagctgaagacgacctgattaccgccacgcgaatgcatcgtgttgaggttgtgtacgaagccctccatcgcctgatgggtgtcgcgctttgtgcgctgataggcttcttcgagggcaagacgcacggccgtagcggggagctgacagccgatacgctcaaggccggcagcgagagcttcggctgcagcatcggtatgagcgagagggggctcgaggccacggagtgcttcgacgaagcccttacgctcctcgtcagaaaagcttctccccgtgaggagactatgtgcatagaggaggcggtcggcgagctgacgaataaaggtcttacgcacgccaggggccataaagaagtcgaaggctgggatagcctgcccgccgtgctcctcgttctgattcgtctggaagacgatcgtcgcaagagtggcgtagctctggatattctgtggggtacggatgctcccattcttcgtgtggaagcctcgctcgaagaggtccgccaggtcgtactgcacgcacgtagcggtcttcgtaggatagtagtctaagtcgtggatatgaatatctcccgcagcgtgagcacgagcgaagggtgccgagaggaggtacttcatcgcatagtccttcgtcacctcagaggcgaaggtcatcatctgccccgagggcgtgtaggcactcatgttcgcattgcccagattgatatcattcttctcgatggagacgataccatccatagtgcgcttgagggtcgtgcgcttctcacgctggacggtgcgccactcacgatagatgatgtacttcttagcgacctgaggcgcgaggttcatcagctcagcctcgacacggtcttggatctcctcgacggcgacctgagaattgcgatgacagagctctgtctggatgagcgactcaatacggagggcatagccttcctcatcgacgaggcctgccgcacggaaggccttatcgacggcactgcgaatcttctcgccatcataaggttgctgacttccatcccgcttgaggatgtagatcgactcttgtcccataggatcttaagtagttgcgtagtttgtagttaggtttcggttggtcggccctacccttctccttcgtcaaggcgatcgaccagctcgagggagtggcatcgggaccgagacaaatgtatgcatttatccatagggttacacacatccgcagggaaaagttatccacaacctctacagcccgctaagcatcggggtattgctctcgacatcaatcagcggttgtacaccgatcggccaaattatctctcgacatcgagatcggaaggaaggttttttgcccctttgaggggaaaaatatccacctaccaaaggtggaaaacgtagcccctattcaccagctcctcaagttacccaagagacaacttatatcgggagtgaaatccccgccatctcctcaacaaaacaacagactatcccacagcaccatagacaccacctccacagatcaaaaaaagcgaccactactggtcagcaagcgaaccagtactgctcacacgagtgaccagtactggttccgtatataggtatatgggtacatgggcagagctatataggatggcgaagaaagctatatagctttggctcgattcctatatagctttcggtgcgaagctatatagctttgtgaagtgacctctattaggtaattgctccgcgtagggggcaaaagttgcggacgagtggcagataagtttggactacgtacgtggctctaatatctacgtacgtggatatttggatttccgtgcctggtctttaagactacgtgcatagatagagaaaatccactacgtgaaggcggttttttcttcacgagaacgatgcttttccctccgctggataagaggaagacgcgcgataaggtgaagggcttgcgtggccacttcggagaggcatatcggggagctgggcgccgatgccttagcactctaaatagaggtcaggactcgcggcaacagtctcttccctctcaatagaagcgaagctgcgagctctaatagccgcccctctcccacccgtatatatacgacacgccccgcgctggatcgggcgatcacagcgcggggcgtataccgtaagaaagggaaggaagcgaggccgtagcctgccgaggggcgaacttaaatcatcgcttcgacggcccagacgaaggcgcgaagtccttgatcaggcgtcgcttcgtccagcgcacgcaggcactccagcagctcgggcacacgcgtctcgggagcgatgacgtacatcgccgagttcatcgtaggccaagcgtggtcaccgatatgtggctcccccgtcttcgagccacggccctgagcccgctcgaaggaggtgtaaccacggaggctcatcttggtgagcaggcgcacgatgatatcgtgataggcctgattgtaggtgatgaagacggccttcatcgactgctcgggggcgaacatttgatacttatccatagcgtggtaggggaattagtgttgggctgcaagcgccttctctgcggcgcgcgtagcgagcttcttctcgagcttcttgcgctcacggacgatacgacgagcttcgagagcggcgtagagcgtggggatgagcacgagggtcaccagcgtggagatcgagagcccccaagcgaccgtgatacccatggactgccacatctcagagccttcaccgataccgagggccataggcaccataccgaggacggtcgtggccgtcgtcatgagcacaggacgcagacgggacttacccgaggtcgtcaccgccttggcgacgcccataccacgctcgcggcacagacggatgtagtcgatgagcacgataccattcttcaccacgataccgatgagcatgatcagaccgatgaacgacatcgtgtcaagtggcacctgtgtgatcaagagaccaaggaagacacccgagaaggcgaagggcacggagaacatgatgacgaaggggtcaacaaggctctcgaactgtgctgccatcacgatgaagacgagcataatgatcagaagcatcagcgtcgtgaggtcaccgaaggtctcctgctggctctcgtaagcccccgtgatcttgtagctcacattgcccgagggtacggggtgagcggcgaggacctcgttgagcttcccgacaagctcactcagctggacgccaggcgtaggcgtgagggagagcgtgatgacacggctacggtccttacgctcgatggtaggaggcgtgaaggcttcgtcgatatgccccagatcagagaggcgaagggtcttaccctgcggcgtatagaccagcaggttggagaggtcttgcagtgactgacgagccccaggagtgaggctgacacggatatcatactcattcccatcctcacggaagtacgaggcgatggtcccgttgacagcagagcgcagataggaggatgccgtagctaagttcagcccattctcagcgagcttctggcggtcgaagacgaagcgaatctcagggacgtagtccttacggctgatggtgacacccgaggtcgtgctgctcttctccatctcctcacggagctgacgcgcataggtatcggtctcagagaagtcctgaccatagatctcgagcgtgacaccacttgtattattaccgttggcacctccgcccgtcgtcacactatacgaagagagctcagggtaggaggcgaggagcttacggagcttatcagacacttcgtcctgcgagagtgtacgctcagagcggggacgcagaccgatgtagcccaagatgatattggagccattgtcctgcatgagcgaccaggagtcgccgtcaccagcctgccctaccgtcatggatgcagtctggatagcggggatctcctcacgcatacgcttgtcgaggtcgaggctcagacgacgcgtctcatcgacacgggtaccgacggggagctcggccttcacctcgatgaagcccacatcctgcttcggcatgtacgaagtcttgatgaaggtgaggctcgcaaggctgagggcaaagatcccgaaggcgatagctacagtcgcacggcgatggcggacggcccagcccaagaggcgagcatagagtgcatccagcttgccgaggaaggcattgataggagcgaagatcttctcggatagtcggctcttcttctcattgcgcttcaggagctgcgaggtgagcatcggagtcagcgagagcgctgctgccgtagagacgatcatcacgatactgatactccaccccagctggcggaacatcagccctgcttcgccgggcatcatcgtcagcggcaggaagaccgcgagcatcgtcagcgtagaggcgacgaccgagatacccacctcattggtagcatgtacggcagcttgcttgggatagctcccgcgctcgatgtgcgtcgtgacgttctccaataccacgatagcatcgtcgacgaccataccgatggcgatggagagcgaggagagcgatatgacgttcagcgagttccccgagacgaggagatagatgaacgaggcgacgagcgatatcgggatcgtgaggacgatgatgaaggtagcacgccagcgcccgaggaagaagaggacgacgagcaccacgatcacgaaggtgatgatgatggtctcttggagcgaatcgatcgtattgacgatgaagctcgaggtatcgatgaggtagccgatcttgacgtccgaggggaggttctgctggatctcggggagggcagcacgaatctggcgagcgatctcgactgagttcgagccttcctgcttcgtgatcataacgatagcaccgctcttcccattgacgaagttctcctgctggcgctccccgacggtatccttgatctctgcgacgtcgcgcagatagatgtccttcccgccgacactcgtcacgatgatcgagccgagctgcataggatcagtgaattccccctgcacgcggatcgaattggtacgcgagccgaggtcaatctgccccgcagggatgttcacattctccgcaccgatgagctgcgagatctgcgccagcgtgaggtggtaagcctcgagcttcgtggggtcacagtagacctgcacgacgcgcttagaggcaccagagatatttatcgtcccgacgccatcgatgcgctgcaggcggttgctgacacggtcttccaagagcttcgacagccccgaggcactctcctcggactcgaccgagaggatagccacggggatcgaactcgtactgaacttaaagatcgtcggcttcttagcccctgcaggcagatagtcggagatcgcatcgagcttgtcacggatatcattcgtagcctccgcgatggcggtaccagcacggaactccagcgtgatgaccgaggaattatcctgactcttcgaggtaatatgcttgagacggtcgataccattgagcgagttctcaaggggcttggagatattcgtctcgatatccgcagcgctggcaccgggataggaggtgacgaccatcacgttggtcgtctcggtcttcggcatcagctcgatggagagccgagagagtgcgaagagcccaagtacagctatcgccacatagatcagggcggtagtgatgggcttccgtacggcggtttcgtaaatactcatagcagacgcttagctggattacttacggagcttgacagagagcccgttcttgaggttagatggcgcagagatgatgacctgatctccagcattgatcccactgacgacctcatagagatcaccctgctgctgaccaagctctaccgcacggtagacggccttgccaccagagaagacatagacatagcgtgcaccgctaccagcctgacggacgatagccttgtcgggtacggtgagggcttccttcgtaccgaagtcaaggtgcacacgggcatacatccctgggcggagcttgagatccttgttcgccacctcgatctcggtagataccgtatgcgtgacggggtcaagcgtggggaagatattcgtgacgataccgctgaaggtctcttcgccgagagcatcgacagagagggtcgctgctgcgcccttcttcaggtaggagtagtactgctcggagacaccgatgacagccttgacaggtgcaatctgctgtatgacgacgacagggagctggggagaagtcatatctccattgtcgtagttcttcgccgtgacgaagccactgatggggctacgcagcacggtgttctccgcagcgttgccgtaggcgagcttcgcctgatcgacagcactcttagcctgctcccactgcgcctttgacacgccaccgaccttatagagctcgtccatacgggcgaagttcgtcttagcgtcagcgagctggatctgtgcctgtgatgcctgcgtagcctccatacgagccacggcctgaccagcgcctacgcggtcaccgaccttgacgaggagctgcttgaggcgaccgccagcctgcgcggtgatgttattgaccaccttagcttcgagctgggcggtgaactcctccgagaggttcagcgcacgcatctctgcgggagctacctcgacgaggcgaacggtgtcagcactctgctcttcggtagccttactcgaggacgaggaggagcagctggcgaggagcccagcactcaaaagggcaaggctcagggtcttaatggtcttctgcgagatcatcttcttatcttattcttatagtttgtacaatgggaaagagggaaggacgggatgttacttcacttccacaggaaggccctcgcccttgagagcatcgagggagtagacagcgaccatatagttgtagatggcctgactgtagttgagacgagcttgcaggagggcggtctcggcatcattcagctcgagaagggtacccgcaccgctcttgtagcgtacctcagcgatactatgaccacgctctgccgtagccacggcatcctgcgcggagacgaactgctcgagggcagtcttctgctcactcacgctattcatcagcccgagacgaagctggctctctgcagccacacgctgagctgccagctgacggatctgaacctcggtggagcggacatcattgccacgcgcaccaccattatatataggcacgtcgagcgagaggcctatcgtagagaaggggctccagcgcttgcggtcgtcgagatggagtttatccgaagcaaagctatactgataggtaaagctcagcgagagcgtcggcatgtaggccatgcgcttgacgtggagtgcagcatcaagctggcgtccctggcggtcgagctgacgcagcgtgctattgtcttgtagcgagatcgcagcactctcggtagggaggtgctgatagacacgatccttgtagtcgaccagatgctcggtgacggtgatgggggtctcgagaggcactcccatcacgaccttcagcttcgcctcggcaagacgcacggcggtacgtgctgccacgacattcggcaggacgttcttcatctgcgtctccattcggatcttgtcgtactcggcgaccagcccgtgctggtacttatttgcgatatccttatagttggcctgtgcattggcatagttcgcctccagcacgcgtagggattcctgggcgaggaggacggccatatacgccttcttcacctcagccaccagatcgatcttcgagccgtgtgccttctcttcagccagcgccacggcctccttatccagcttgagtgaagcccagagctgcggagcgatgagtgccatacccgcattgacaccgccctgcagagagtgcgtctgccccatctcgatcccgtcatcggggaagaagctccccatgggagagcccgagccgcccatatcaccgaagtagaccttctgcttcttgagcatatagccataggagcccgagaggctgaccttcggcaggagcgagccacgattcttcttctgatcatacttcgccccgtcgataccgaggagggtagcttgtagcgtgggactcatctccagagcgatgcgtacagcatcattgagcgtgagggagaactgatccttggtgatgatcatctccgtctcggcgggcttatcttgcgcctgtagcgtcgcaggcagggcaatgatcccgagcgctaaggcccacataccgggctgccaaagcttcggggaattcgtcttactcatacattatataataataggtcctcgcgcatacacgaggtgtacttctccttcacaacataggggagatacgttcgttcacacaaagatacaaatagcgaagaatggactattcttagcgtaatatggtacaacatccgctcatttccctgcggcacacagcccgtccaaacgcgagaaccctctaccctcccatagtgtcatccaccttggctccagaagggaggtagcaccacttcatcgagggggtgatatgaacctatatgggtcagcgggtggacctatattggtcgccagacgaatctatataggtcagccagcgaacctatatagatccacccactgaccaatatgagactgttgctccgcgtagggataaaagttgtggacgagtggtagataagtttggactacgtacgtggctctaatatctacgtacgtggatatttggactgacgtgcctggtctttaagactacgtacatagatagaagaataccactacgggaaggcacttttttcttcacgagaaggacacttttccctccgctggataagaggaatacgacctactaatgaggagggtactttgatgcggaacccctaaaatctcatcacaaaataaaacaaatgtggtatctttgtagttgattaggtgcacgatgctctctggggtgtcgtgcgcgtatgccttgatgcgctccaccatccatccctacgacacgggactcgtaaggtcggtgtgccccactgaagacaacacagggagcaccattattatagagatagggataggatgccatgagtgcttcacggacttcgcaagcataagtaggaatagtaaaccgtcgcacgtgctacactcccccgagcgggtcacgtgggcttcgtcgtcttgtcccctactccacatacaggagaggcgatgagcagactgagccggacaattaagaagaagaagaatgagacagctaaagatttcgaagtcgattactaatagagagagccagtccctggaccgctacctccaggagatcggccgagaagaactgatcactatcgaagaagaggtagagcttgcccaggccatcaagcgtggcgaccgcaaggctcttgacaagatgacccgtgccaacctccgcttcgtcgtatcagtagctaagcagtaccaaaaccaagggctctccctgcctgacttgatcaacgaaggcaacctcgggctgatcaaggccgcagagaagttcgatgagacccgaggctttaagttcatctcctacgccgtatggtggatccgtcagtccatcctgcaggcgctcgctgagcaagcccgtatcgtccgcctgccactcaaccaggtcggtacgctgaacaagatcaccaaggccctatctaagttcgagcaagaaaacgagcgtaagccctccagcgaggagctcgctaaggagctcggcatccccgaagacaagatcaccgataccctcaaggtatctggtcgccatatctccgtagacgctcccttcgtcgatggtgaggacaatagcctcctcgacgtgctcgtcaacgaagacgcccccaacgcagaccgcaccctgatgaacgagtccctctcgaaggaaatcgatcaggtgctaatgaacctctccgagcgcgaagctgagatcgtcaagctcttcttcggtatcggtggtggtcaggagatgaccctcgaggagatcggtctgaagttcggcctcactcgcgagcgtgtccgccagatcaaggagaaggctatccgccgtctgcgtcaggagagcttctgcgcctcccttaagccctacttaggctaacgcctcacattcgcctccgcccatctccccctaaggcaggagaagcaaggcgcccatctatatggctacgcacgggctctcgtgcgtagccattcttctttttagcccatttgttgccccacatcacagggcacaccttcctcttcataccaagatctatgaagcgacgccgtacattcgatctggtcagctacctccagcgtctgcacctcctgcccgagcgcctcacgcgcaagaccgaggcggaggacctcctcaagcagctctacgaccacgagaagagcacaggtaaggctcccgatcgcctcacctcgcgcgaccttcacctctcacccgagcaactcgaagccctacagcgtgagctggagcgcgagggactcaccgagcctggagccctgcgcctcaccgaagcgggccgacagcgtgccctcgagctgacacgtgcccaccgcctctacgagctctatctcgccgagcactcgggctatgcccccgaggactggcaccgcatcgcccacgccgaggagcataagctcaccgagcgtgagcatgagcgtatcgctcgcctactgggcaatccgctcttcgacccacacggcgaccccatccccacgagccaaggtaccgagcctgctataccgcacagcctctctatcgaagagctaacagaaggtcagtggtactacgtcgagcacatcgaggacgacgagcccgagagcttccgcctactcatcgacgcagggctgacacgcgactctctcttccgactcaatcgcctcgagagcgcccgctcacagatctactacgaaggagaagccttagagctcccgaccttcgcctttgtggctctcacccttcgccccgccaaggaggaagagctgaaggagagccattccgaagacacgatacgtctgacccgactgcccgagggtgtagaggccacgatcctcggcctctccccttcctgccgcggagctatgcgccgccgtctcatggacctcggcttcgtgcgtggtagctcgatccgcatcgacatgcacagtcccttaggcaatcccacggcttatatcgtgcgtggagccgctatcgctctacgccatgatcaggcccgatacatcctcatccaacgtccccatgcctcagcaaccgaataactccgcctgcgcctcttgcgccgcctgccccgcctctaccctgcagcgccgtggcgagcacaccgaggatgcgcgcttcaccatcgctctggcggggaaccccaacacggggaagagcaccgtcttcaatgccctcaccggcctcaagcagcacacgggcaactggcccggtaagaccgtaggtaaggccgaggggtcgttcgcctacgccggcgacgtatataccatagtcgacctccccggcacgtactccctatcctccacgtcggaggatgaggagatcgcacgtgacttcatcctcttctcacgccccgacgtgacggtcgtcgtagcggatgcgacccgcctggagcgcaatatgaacctcctcctgcaggtgctccagatcaccgacaaggctgtactctgcgtcaacctcctcgatgaggcacggcgcaacaagatcgagattgacctcaacggcctctcccgtcgcctcggcatccccgtcgtcggggcgagtgcacgctcagggaagggcatcgacacgcttctcgcgacggtgcgtggagtagccctcggcgagatcccctgcacgccctaccgcaagagccgcctacccgagcgcaccgagcaagccatcagcacgctcgaggccgagatacagaggctctaccccaccgtaccaaatagtcgctgggtagcctaccgcctcatcgaggaagatccctcgatcatcagccgcttcgacaagcctgagctactcgacttagcccgtcgcgtacatatcgagattggggagaacttccacgaccagctcaccgaagcgatctatgctgatgcctatcgtatctgctccgaggtcgtcgtgcaagcctacgcctcgggccgtctaccactcgacgtgcggctggataggatccttaccagccgtctgtggggcttccccatcatgctactcctgctgggtggagtcttctggctcacgatcatcggctcgaactatccctcctcactcctcagcaatgtcctcgtcgggacgctccatcccttcctcaagaccacacttgctggctggggcagtccctggtggctgacgggcttcctcatcgacggcgtgtacctctccacggtatgggtcatctcggtgatgctcccgccgatggcgatattcttcccgctcttcaccctcctcgaggacttcgggtatctcccccgtgtcgccttcaatctcgacgaactcttccgtcgcagtggcgcccacggcaagcaggccctcacgatgagcatgggctttggctgtaatgctgctggcgtcgtctctacccgtatcatcgacagtgagcgcgagcgcctcatcgctatcatcacgaataacttctcggtgtgtaatgggcgctggcctacacagatcctcttagcctcgctcttcatcggggctgccgtgccgacggcctacgctgggctggcaagcatcggtgcggtactcatcatcgtcttactgggcatcggggtcatgttcgcctcctcatgggtactctctcacacggtgctgagaggcgaagtatcgaccttccacctcgagctaccgccctaccgtccaccgcagttctggcgtacactctatacctcggtcatcgaccgcacactcatcgtcctctggcgtgccctcgtcttttccgctcctgctggagccctcatctggctgacgtgcaatgtgcatatcggtggtgagagcgtggcagcacatctcattcgcctactcgacacgccgggctacttcatggggctcaatggcgtgatcctcctcgcgtacctcctcgctatccccgcaaatgaggtcgtcatacccacagtgctgatgctgacgacgctgatcatcggcagtgctggaggcgatgctggcgtgctgatggagggtggcgatgcagagaccttcgctatcctacagagtggtggctggacgctcatgacgggtgtctgtatgatgctcttctgcctcctgcaccacccttgtagcaccacgatctacacgatctataaggagacccacagcattcgctggacgctcctctcggtccttctaccccttggcctcgggatcatcacgacggtcatcgtggctggtctctggcgcttcctctcgtagacgggcgtcacgactccataggataaaggctgagccctcccacagtgggagggctcagcctttatcttatacgatggatcggaggatgttagcgctccttcttatcctcttcgtccttagggtaatagccgtactcagcatgatcacggcgtcgctcgcggtagcgcagcacgaggaagagcaggacgatgaccagtagcgtaccgcccatgacagcgagccactgcacgcctgcgggatccgagagcgatgcgcccttgggatagaggtagaccccgaggacaacgagatagaggaggagtagaaagacgcggagcttgatcgacttcatacggctgagcggattatagttcggaggaagaaggcgtgacaagggcaagtagtgtctcgaggtagtgacgactattggagagacgtggcaccttgtgctgcccaccgagcttgccttcactctcgagccagcggtggaagagccccttcggagcaacatctaccgtgagtggaaggagggtcatatcctcatagcgcttagcatcgtagtcggagttcagcgcgcgcagagcagtatcgaggtcggaggtaaatgtcgcgagatcacggggaggctcctcgaactcaatgagccactcatgtcgccccttcccttcgtcgaggaagaagcgcggcgctgccgtgtattcgctcacacgtgctcggccatcacgacggcaggcttcgctcagagccgcatcggtattggcgaccatcacctcctcaccaaaggcattgatgaagtgcttcgtgcggcccgtgatgacgatgcggtaggggtggagcgaggtgaagcgcaccgtatcgccgatgatatagcggtagagaccacccagagtcgagatgaccatggcgtagtcacgcccgagctcgacctcctccagacggagagcacgacagctcgagtagtcgcccgaggcgggtagctcatccagcgggatgaactcgtagaagatcccgtagtccagcatcaggagcatccccgcctcagctgggtcatcctggatagcgaagaagccctcactggcattgtatgtctcctcgtagcgcatacgctcagaggggataagttcggcgtaggtactacggtagggagtgaagctaatccccccgtggaagaagacctccaggtcgggccatacttcggtgatcgtctcgcgccccgtagcttggagcacctccttcagtaggacgagcatccacgaaggcacacccgagagactccccacacgtgcggtggcgacctcctgcacgatggcctgcatcttcgcagtccactcgctcatcaggagcgtctcgcgcgaaggcacacggagcatatctccgagaagtggcatgtgctcgacgaggatggcactgaggtctcccgagaaagccttgcctccgcttaggggcataggactgtgactccccccgaggacgagccccttcgtcgagaagaagcgggagtcggggtagttcctcagatagatccacagcgcatcgctcccaccacgatagtggcagtcctgcagatggagatagggtacggggatgtacttactgcggtcgctcgtcgtaccgctggacttggcgaaccactggcaagacccaggcacgaggacatcacgctcgccacgggtcatgcgctcgatatcgtccttcagcccctcgtagtctacgatgggtacatcggtgcagtaggagctgtacgtcgtcttgcgggtgagtccatagcggcgcccgaagtcggtgcgggctgcacgggcgaggatatggcggagctgctcagcttgaagctcttcggcacgtgtggcatactgctcgatacggcgtagacgaagcttcgcaacctgatagacgagactggtcttgagatccatagactaagagaggggggtatggggatagttctcacgcttggcgagtgcacggcgcacgtcctctacctcgagatagcgggtatagaaggccgactcgcgggcatggagtgcacgctgccagctcccggcggggcagagatgacgcaggcgacgccagcggagataagcattgtagtgacggaggaaggtgggggcactcatcccttcggagcgctgggcatagcgcagtgccagcttcggtaggcggtgaagccagaagctatcgcaggcggcctcgagggcaggctgcaccacagcaggatcccagcctcgcgcctcagcataggcacgaccgagagcttcggtagcacggggatgggcgaagaggcgatcaagattgcgaatactcgcacgcaggctcagcggagtagcggtgaagtacatgcggttcaggtcgacgagcatgaacgtgtactcctccttcgcgcgatcatatatataggggatattccctggcgagagatcttcgtgcacgataccactctcgtggagctcggcgaggaaggtagccagcgcacgcgtcagcgactcattgacctcacccgagcgagcctcatactgaaggtcgacccccgtgaaggcgaggtagcgcgtgacgtaatagctgtcctcgagaccgcccagtgcgctccgctcttcggcatagccgatgggctcgggggtggcaatgccgtaggctgagagctgcacggcattcagcagggagcgccgtgccttgctggagttcgtccagccatagtagaggcgacgcaggagcgacaagcgcccgaagtgcttgatcgtaaagtccccctcagggcactcgacacggtagaggacattgcgcccgcggtagatctcggtgatatgcactgctggagggagctcgctgctccccccttcgtggaggtgaatatagctgagaagctgggtcagaagggcctcaccctcggggacgacgctgtgatatcggagcaaatctttcgtatcattaggggcgaagaccttcgccgtggttcagtagcaaagatacaaactatccccgcccattgcttggagcgcgaggctcctgcatcaaaatcgcctcctcatcggcaagccgtatggaggcaaagttgatctgcaaaccactatttgtttggtacacgaatgaatagaggagcctgctaccgagagtcctgccctctatttattctgctaaggtatcgtgcacccagctccccgatatacctctccgaagtgaccgagcaagccctttgccttatcgcaagtattcctctcatccagcggagggaaaagcatcgttctcgtgaagaaaaaaccgccttcacgtagtggtattcttctatctacgcacgtagtcttaaagaccaggcacgtcagtccaaatatccacgtacgtagatattagagccacgtacgtagtccaaacttatctcccactcgtccgcaacttttatccctacgcggagcaacaagctaatagaggtcgcttcacaaagctatatagcttcgcaccgaaagctatatagaaatcagttcaaagctatatagctttcctcgccttcctatataggtcggagcgcaaagcaatataggttgccaccaccccctattattgctgggcactatggaagagctatctttgtagatacacgaatatattcaccctctaaatagttacatacgacagcactatgcgaatgactacccagggcttacgctatacggcactcgccttgtccctctccctgacgagcctcttcgcgactcaggctgaggcggctgtggatagccttcagctcatcccacgccccgtaagcgtcacctatggcatgggcacgctccgtctgccccataccctccgtctctccgctggagcacccacctccctcagcgacggactcaagaagcagtccttcaccacgaccgctgccaagggccgcatgaagggtcttatcacgacccgtctcgatgcctccgtcccaggcctcgaaggctaccgcctcgagatcggcaagcaggggatcaccctcactgcccgtgatgaagcgggtctccgacagggtacgcagtccctcctgcagatcactcagcagtacggaggagccctaccctacctcaccatcaccgactcagcacgcctggcctatcgcggcgtgatgctcgacgtctcgcgtcactttatgaaccgcgatatgatcatccgcctcttggatgagatggctcgctataagctgaaccgcttccactggcacctcgtcgacggtggtggctggcgcttcccctcgaagaagtaccccctcctgacgaagaaggcagccttccgcacagtaagcgattgggatcagtggtggcagaaggatcgccgcttcgtcgacgaaggcacccctgggagctacggcggctactacagcctggaggacatccatgccgtactcaaccacgctacccgcctcggcatcacggtcatccctgagatcgagctcccaggacatagcaacgagatcttcgctgcttatcccgagctgagctgtctcaacgaatgggcctttgagaactccgacgtatgtatcgggaatgagaagaccttcaagttcttcgaagatatcctcgacgaagtcatggcgatcttcccctcgaagtacatccacatcggtggcgacgaagctacgatgaagcactggggcaagtgcgccaagtgtcaggcacgtatgaagagcgaggggctcaaggacgagcatgagctccagagctatatgatccgccgtatcgagaagtacctcaacagcaagggacgtaagctcatcggctgggatgagatcctcatgggtggtctcgctcccgacgctacggtcatgagctggcgtggcgaagagggcgctatccaggctgccaaggaaggccacgatgtcatcctcacccccaatagccacgtctatctggacctctatcagcgtgagtccgatcacgagccccgcgctaatggcggcttcatccctctggagaaggtctattcgtacaaccccgtacctaaggaactgacgcctgccgagaccaagcacgtcctcggtgtacaggccaacctctggacggagtacgtcctcgatgagccccatgccgaatacatgctcttcccccgtatcctggcactctcggaagtcgcatggacgccccagcaggatcgtgactataagaacttcctgacgcgtgtgaactaccacgtccccgcactcaagaagcgtggcatcaacgtctatcctctgcgccgtatcgctgccatcaatgaggtcgacaccgtgaagcacctcgtctctgtaagcctcgacagtgagcgccccacagctgacatccgctacacgacggacggcacagagcccacagctcgctcgcctcgctacacaggtacgcctcttacctcacgcgactccctcatcgtcaaagcccgcctcttcgagggcgacaagatgatcgatgctgcccctatgatctccttccgcaccgactaccacaaggctatcggcaagaagatcacctacaacgactgcacgtggaatgagcgctacaccgcaggtggctcacgcgccctcatcgatggcgtgcgtggtacgcccacctacctcgatggtcgctggcagggcttcacctcacctatggacgtgacgatcgacctcggtgccgtgacggagctcagccacatcttcgccaagttcatgcaggagcgcgtccagtgggtctacatgcccggtgatgtagagatcctcctgagtgatgacggcgtgaacttccgcagcgtagctcgccagaagacgctcacctctgaggacatctataagcccgtcttcgagaccttctctttcccgatgaaggagcgtgcgcgctatgtccgcgtgaaggcaagcaacaaccgctcggctgggcacttcatcttctgcgacgagatcatcgtgcactaagcctcccgatagccacagcggctataccataatatatatgacaccgtccccagacgagcgagatactgctcatctggggacggctcgtatagtacctctcccctcatcgacctcccctcctaccgctaagcgataagcctactctccaataagtagggaaaagttaataactttgtgccgagtatgcgcccgtggatccagacggagaacgggcattccacagcacctctttggggcaatttcatcgcccaccaatgaaggggtgacagatgataaattattagatgaaacataagatcaagtccttgctttggctgacctttgcactggtctggataagcatcttaggcggtatcttcgctatttccatggggtggataggctacctgcccccgatcgagcagcttcagaacccgatcgacaaatacgcctcacaggtcctcgccgctgatggtgaggtcatcggttcctatgctcacgggggctccaaccgcgtccttgttgactataaggacctctctcccaacctcgtcaaggctctcatcgctacggaagacgttcgcttcgaggggcactcgggtattgacttccgttcgctcgcacgtgccatcttcaagacgggtatcctgcagcagaagagtgcagggggtggtagcaccatcacccagcagctggctaagatgctctactctcctcccagctccaacttcttcacccgtatgatgaagaagcccgtggagtgggtcatcgcagctaagcttgagcgctactacacgaaggaggagatcctggcgatgtatctgaaccagttcgacttcctctacaacgccgtagggatccgctcggctgccttcacctacttcgggaagacgcccgcagagcttaacctccaggagtcagcgatgctcatcgggatgtgtaagaacccctctatctacaaccccatcctccgcgctaatagccccctccccatggagcgacgcaacaccgtcttccagcagatggagaaggctggctacctcacagagcgcgaagtcgactccctctcacgtctccccatcaagacgtccttccaccgcatggaccacaagcagggtatagccccctacttccgtgagcacctgcgtaagattatgatggcggataagcccgaccgcagcgactatgcttcgtggcagtacgccaagttccgcgacgacagcatccagtgggagaccaacccgctctacggctggtgtaataagaaccgcaagcctgacggctccccatacaatatctatacagacgggctgaagatctatacgacgatcaaccccgctatgcagcgctacgctgaggaggccgttgaggagcacctcgcagggcatctccagccagccttcgaccgcgagcgccgcgctcgtggtggcgatcccttcagcacctcgatctcagccgatcagcgtaagaagatccttgagcgtgccatccgccagtctgaacgctggcgtctaggcaaggaggacggactgtcggattcggagatccgtgcgcagttcgaccgcaagacgaagatgcaggtctggtcttggcgtggtcagcgcgatacggtgatgacgcccctcgactcgatccgctatatgaaggggatcctccgctcgggcttcgtagcgatgaaccctcacaacggccacgtcttggcctatgtgggtgacattaacttctcccagttccagtacgacatggtgtctgacgggcgccgtcagacggggtctatcatcaagcccttcctctactctctggcgatgattgacggggcttccccctgcgatcaggtcctccacgtacagcgtacctaccgcctcgacaacgggcagacctggaccccacgtaataccaaccaccgccgcgtcggtgagatggtctccatccagtgggggcttcagaactccgacaactgggtgacggccgagctgatgagccgtacctctccgctgaccttcaagcgtctcttggagagctatggtctacgtggccccatcgaggctacgatggctatgtcgctcggtactcccgaagcgaccgtcggcgagatggtctcgggctacaccaccttcgtcaatgacggcgtacgtgtagatcccatcctcgtcactcagatcgaggatatgcacggcaatatcgtcgcgaccttcgctccgaagatgactgaggtactgaccgctgacgctgcacacaagatgctctacatgctccagaacgtcgtcaacggcggtacggggggacgcctacgctcctccttcggcctgcagatgcctctgggcggtaagaccggtacgacgcagaataatagtgacgcatggttcatgggcttcactcccgacctcgtagctggctgctgggtaggtggtgaagagcgtagcgtgcgcttcaactcgatggccttcggtcagggggcggcggctgcactgcctatcttcgggaagttcctcaagaaggtctacggagatagcaagctcggctacctctccaacatacccttccagctccccgagggcttctcgccctgctacgatgcaggcaatagcgacgaggccgtcgagatctacgagggtgtcaaccccgactccataggctcctacaccccattctaaggggggaaggaaatccctactgcataccgaatagataagaccaatagatatagcacgtgaataaggtcgcactcatcaccggggtaacgggccaggacggctccttcctcgcagagttcctcatcgaaaagggctacgaagtccatggtatcatccgacgctcctcgtccttcaacacggagcgtatcgagcacctttacttcgaggagtgggtgcgcgacatgaagcgtggtcgggcactcaacctgcactatggcgatatgaccgactccagttcgctcatccgcatcatccagcagacccagcccgacgagatctataacctcgcagctcagagccatgtgaaggtctccttcgatgtacctgagtacactgccgagaccgacgccacaggtacactacgtctcctcgaggctgtccgcatcctcgggctggaaaagaagacgaagatctatcaggcctcgacttctgagctctttggtctggtacaggagatcccccagcgtgagacaacgcccttctatcctcgctccccctatggggtagctaagctctacggcttctggatcacaaagaactaccgcgagagctacggtatgttcgccgtcaacggtatcctcttcaaccacgagagtgagcgccgtggcgagaccttcgtcacccgcaagatcactctggctgctgctcgtattgcagcaggagagcaggacaagctctacctcgggaacctcagtgccctgcgcgactggggctatgcccgtgactatgtcgagtgcatgtggctcatgctgcagcacgacacccccgaggacttcgtcatcgctactggtgagcagcactccgtacgtgagttcaccgagcgcgccttccacgaggtaggtatcgacctacgctgggagggtgaaggagtcgaagagcgtggtatcgatatcaccacaggtcgcgtcctcgtcgaggttgacccgaagtacttccgccctgccgaagtagagaccctcttgggcgaccccacaaaggccaaggaactcctcggatggaatcccagcaagacctccttcgaagagctggtacggatcatggtacgccatgatgtcgcctacgtccaatcccacaagcacgcctaatggactcacccaaactctccccttcgaccaagatctatgtcgcagggcatcgtgggctcgtaggctccgctatctggcgcaaccttgagcagcgtgattacaccaacctcatcggccgtacccatggtgagctagacctcacggatcccgtcgctgtgcgtgcgttcttcgatgaggagcgccccgaggcggtgatcctcgcagcagcacacgtcggggggatcatggcgaacaatacctatcgtgctgacttcatctacgacaacctccagatacaacagaacgtcatcggagagagcttccgccacggcgtaaagcacctcctcttcctcggcagcacctgcatctatcccagagaggccgagcagcctctccgcgaagaagccctcctcactgctcctctggagtacaccaacgaaccttatgctatcgctaagatcgcagggctcaagatgtgcgagagcttcaacctccagtacggcacgaactacatcgcagtcatgccgacgaacctctacggccccaacgataactttcacctcgagaatagccacgtcctaccagcgatgatccgcaagatctaccttgccgatcgtctgcagcacagagactggcaggctgtgcgcatagacctaagcaagcgccccgtcgctggcgaagacggcacgggagatgaggcgactatcctcacgctccttgagcgcttcggcatccactccggccaggtcaacctctggggctcaggccgtccgctgagagaattcctctggagtgaagatatggccgatgcctcggtacacatccttctcaatacggacttccgctcactctgcccccaagatggcagccccatccgcaactgccacgtcaatatcggcacggggaaggagatcacgatcggtgagctggcacagctcatcgcccgcaccatcggcttcaagggacgtattgagtgggacagaaccaagcccgacggcacgatgcgcaagctcacctccgtagagaagctccacagccttggctggcaccatcaggtggagatcgaggacggcgtacagcgcctcttcgactggtaccgtacccactaatagcatccccgaagcgacctcgtctgagatgtcccgacgctccaagtacatcaagcgtatcttgtggggaatcctcctcacgcccttcgtcctaatccttcttgtagcagtactactatacgtaccgcccgtgcagcgctttgtcgtacagcgcaccgctgcctacctatcggagaagactgggatgcaggtatctgttgggaacatccacctcgccttccctcttgacctctcgcttcagaagctacaggtcctccgcagtcctggcgacacactcatctcggtcgggtcgctcagtctctcccctgccctacgccccctcttcgacagccaagtcgaggtccctcgtattgctctcgacagcctgacctacaatcagcgcgacagcctcggcttgagcctcctgcaagtacacctcccagcagccactgccgagcagctcttcgttgatctcaacaaggagcgcgttgacctcaaccgcctcacgacccaggggggctacatccgctactactcgaccgacaccacgaagaggcctgaggaagagagtgagccgctgaagtggctcatccgagctggcgagatagatctgcagaagactcgcattgaggtcgccatgccgctggattcactcctcatcgatacggatgtcgaccgcctcaagatcgatcgcggagaagctgacctcaataagatgcgcttccaggtcgcccacgccaagatcgatgcgaagagcctacgctactccgtcgaccagaacttctccaagctccccttcttcgatccccagcacatccagatccatgacctccacctcgagggtgaggacatcgactctgagggtatgcgacttagcctccttctacggcacgcacagctgcgtgagcagtcggggctgaagctcctccatctcagcggacactatcagatggacagcctcgctatgcgccttgatgggcttgatctcatcaccgatgcctcctccattaagggctatctctccatgccctggagcctcctacagtctgaccgcaaggcacagctcgagctatctaccaacacttctctcggcatcaaggacgtcctcctcttcgcaggaaagacgctccaagagacccgtgatggacgcgaacttttcaacaccttcgcccgacaccgcctccttgcgccactcaagatacagaccgagctgacggggacactcaccgcgatacagattcgtcaggccgagctcaagtggcccgacatccttgacctcaatctctcggggacgctcagcgaagtccttgagatgcaccgctcaggtcgtctcaagcttcgtggacgtgtgggtcccaaggctaataccctcctcggactccttgctcccgagcaagctaagacctatcgcatccccagcccactcacactctctggtgatgtcgacatccgtcgaggccgttatgagggagatctcacagcagaggagggtacgggcaagctccagctgaagggccacttcactgaggccactaagacctatgacctggtgctgaaggcacaggatattgatggccgccacttcatgcctcaggactccatcgggctggttagccttgacgtagctcttcaggggcgcggcttcgatccactcagtccccatacgcagctctctatccgaggccgactgcatgaggcaaatcggggtagcatgcatctgcaagacatcaccctcgacggctccctccagtcggggaacctcgggctctccctcaacagcatgaaccctggggcaaactttacgctccagcttgacgggatcttctcccgccaaggcatcaatacaggcatcggactggagctcgttgacctcgacctccagcgcttgggcttctccgagacaccacttgcggggaagctccgtctggagggtgagctccgctccgacctcaaagacacgcacaccatacaagccgtacttgatggtatgagcttcactatgggcgatgagaagatcgccccaccacaggctgagcttcatgtatccacgtcgtcacaagacattcatgccggcctcacctcgggcgatatgaaggcctccctctatgtcgggagcagccccaccgtagcgcagaaggacgtcacgctcctactcgatgagaccctccgtcagatcgagctcatcacctcaggaaagtccgcgacgaagcatcttgaggacctcgctatccacctaccgaaggcgaccttcagcctctccatgggcaaggacaacccactccgctactacctcgcagagcagcgtatcgccgtaggttccctgacggccaacctcgctacctctccccaaaatgggatcagtggcaatgtagccatctccgatcttcgcgttgacactctccgcatcaacgcggcccagctcaatatctccactgagcgcacagctatcgcacgaggtgatagcatgtccctcgctctcttcggtacggtcatgaagtcccacttccgcgagcaagaaggcttcactatcaacaccgacctacgcacaagtctcgagagcggacacctcgacgtctcctatcaggatgagcggggacagaccgtgcacgctgccgaggcttcgggtagctggtcgggcgaagcttaccagcttcacttcctcggtgaccgcctacgtatcgcctacaacgactacaccatcaatcccgacaaccagctcagcctacgtaagcgggacaacttcctcctcggctcactcaagctcaccggtgagaagcgaggcgaattctccctgcagggcaccgaggagacacctggagtgcaggacatcctactcagtatccacaacctccatcttgaggactaccgcagtctgggactccccgacgtcggtgggatcttcttcggcgacgtccactaccagcgtaagggcgacctcagccagcagccgacgatctcgggtgacctctccatcagcgacctacgctacgaggacaagaagctcggacacttcacctcctccctcttctacgagccacgtagcggtgactcccattatatcactggggaaattggctacaacggtcagccagcgatgagcatcgatgggatctactatccccgtgagaaggtctccccgctcaagggaacactcacgcttacctccttcccgctggagcttgcgaaccccttcctcgcggagaatagtaccacgcttgcggggacagccaacgggagtatcagactctcagggaagctcaccgagccacttctctcggggcagatgcacctaaacaagggtatgctgaacctcaacgcctacgggacacaccttgctctcgactctatccccgtacgcatggagggctcagatatcttctttgaccactatgcactacgtccctcaggagatccgaagaaggcgatctatatcgatggctcgatacataagagtaccacaccacaggctacggcttcgctacgcatcacctctgatgagctgaccctcctcgacgagcctcgccccacccgtgacgaccagctcctctatggtaagatcatcgcctcgacacgtatggtggctacgggtccccttacctcactgcgcgtccgcggtagcgtgaacgtactcagcggtacgaactgcacctacgtcatgcgcgaagacccgctgacagccagccagcagaccgatcagctcgtccagttcatcgacttctccgacaccctcttcacaaagaaggtagagatcgcccccacctcccttggtgggcttgatgtgaatctgacgatcaacgtggacccctcggtacttatcggcgccgacctcacggctggcggcacagactatgtccatgcacaggggggcggcacgcttcatttcacctatccgccctacggcgagatgagtatgacgggacgctacgagatgagtggtggtggcgagctgagctacaccctccccgtcgtgggcaataagcgcttctccatcgatcccaccagcaccctcacgtggacgggaccgatatccaacccctacctcaacttctccgctgtcaataaggtcaaggccaccgtatccagctcgtcggagaactcccagcgagtgaacttcaacgtcagcatcctcatcaaggactacgtcagcaagatgaacctcagcttcggcatctccgctccggagaacctctccgggcagaatagcatctcgacgatgaccaaggaagagcagagcaagcaagccatcgcccttatggcgacaggtatgtatctggcaggtggctcgggggcaggcaatctggacctcaactccgcactgacctcactcctgcagtcacagatcaacaagaccgcaggcaagctcctccaaggcaccgacctcaacctcggcgtcgaccactacgatggctcttcgggtgaggctgctcgcacggacttcacctatagcttcagccgccgcttctacaatgaccgcatacgtatcatcgtcgggggtaaggtgcagagtggcgcaggcgtgacaaaccaggggcagaccttcctcgacaacgtatctctgcagtaccagctcgataagagcggtgagcagtacctcagtctctaccacaagctcgtcaccgacaacgtcctcgaaggggaattcaccgagacgggtgtggggtatgtcatacgccgcaagatgtccagcctactcgacctcttccgccgtaagcgcaagaagacgacgaccgacaccacgacgacgctcttccgtcaagtatggaagccccgtctcgatacgctctcgactcagccgagcctcacgagcgactcgatgcctaccctccgctaccaagcgaagtaaggcctccagccctccctatctacacctatcccacttatgcatatccgtctcactacccgcctccttaccgccctcacactcctcgctctcggggcgtgctcgataaggaagtatcagggtccagatgaccagatttatataggtatccgcaagatcgaggtttccgaccgtccgcagcactcctacgctgagcaggcgatagccgctgccgaggagcgcctcaactatgcgcccaacgggtcggtcttcggtagtagctctatacgcttcccctttgcactcctgagtcctgctatctacatgcacttctctgcggactctacgcttgcggggcgcgtgatgcgtcgcctcacagccaagcccgtctggatgcgagacgtcagccccagcctgcgtgccaaggtcgcccagcagacgctccgtgagcacggctacctccgcgccacgaccagctccgagatcatccccgccacggccgactctatgcaggcacgtgtggactacaagatgcagctgggcccactcttcctcttagacagcgtgcagtacttccctcgtgtctacatccgccctgggagatacttctaccatcaccgcctcagtgccctacagaagggacgccccttctccatcgctgcactcgaggatgaccgcaccatcacccgtgccttcctccgtgagcacggctactattacctcaagtctgagcacatcggctacgaagctgataccctcatcaccccacagcgtgtgcacctacgcacggtactctctacgagcacgcctcccgaagcgctacgccagtggcgtgtggggaagatcatgctccgccagctccccgaagatcctgaagcccccacgaacctcaccacgacggatagcgtagccctcaccgacagcatcgctctgtactactcgggccgccccatcgtccgccccggtacgctgaggacccgtgtccgcatccgcccaggcaagctctacagcagtctcgaggaggagcgcacactatcggcactcacggggctcaatgccttctcctccgtagaattctacttcacccctcgtaagaccttacccaaggactccacagcggtagatagcacagcgatgcgtagcacgagcgactcgaccgccgtacagcgccccaccttctcgagcgtcgcagacagcatcggcacgctcgatctgatgatcctcctcaggaaggacaagccctggagcacctacctcggggcggccttcatgcgtaagtcgacggacttcatcgggccaggtatctcggctgctatcgagcgaagcaacgtcttcggtggtggggagaagctctccgccagcgtctctggctcctatgagtggcagacggggcgtagccctgcagactcctactcggtgtctatcaatagctatcagctcggtgccgacctctccctcaccttcccctcgatcctcttccctcgcctcatcgatgcgtactacaagtacccgacgtcgacgagtttcaaggtcgctcttcagagtgtcaatcacgcgcgctactataccctacgctccctctccttcacgatggactacaacttccagccgtcgagcagatggagccatcgtatcacgccgctcagcctgaacttcactcggctgacccgcacgacggagcgcttcgaccagctcatcctcgccaaccccgcccttgggcttagcttgagcaatcagttcatccccaaggtcggctacggcttcacctatacccaccgcgaggacgacagcccacactacatgcagctctcgggcgaaatcagtgaggcagggaatctcgtcaatgctacgatgagggccttcggtcgtgaatacaatgacacgaagacgctcttcggtgtaccctttgcacagttcgtcaaggctgccattgacctccgctactcctaccgcatcgaccgcatgcagacgctggctacgcacttcgctacgggagctatctatccctatggcaatgctattacggcgccttatatcgagcagttctacgtcgggggtgctaatagtatccgagccttcacggtacgaagccttggcccagggagctacaatcctacgaccgtcaatgcctactccttcatggaccgcgtgggagaattcaagctcgaggcgaacgcagagttccgccgtcacctcttcggtagctgctacggcgctgtcttcctcgatgcagggaatgtatggctcctgcgccccgactcctctcgtcctggagctgcactcagcgaagcaggctcgttgggtaagttcctcgaccaagtcgccgtaggtacgggagcaggtctgcgctatgacctctcgttcctcgtcgtgcgcttcgatgtcggtgtgggcctccacttcccctacaagacgacacgaagtggctggtataatatccccagcttccgcgatgccttaggcttccatctggctatcggataccccttctaagctgctacggcaaaggcacctacccctcttccttccctcatcttcacgaaagtgctaccccagacccatagcggtaaggggtacgaacctatattggtcgctgagtcaacctatataggtcgtgatgcggatctatattaggttcttgcttcgtgtatggataaaagttgtggacgagtcgcagataagtttgggctacgtacgtggctctaatatctacgtgcgtggatatttggattgacgtgcctggtctttaagactacgtacatagacagaagaaaaccactacgggaaggcgcttttttcttcacgagaaggacacttttccctccattggataagaggaatactcgcggtaacgacggagctccatgaagaagctccatgcagcggcagctcatgcctcaagctattcggtgagaattagctaactttgcgccagttcggcgatgcctcccgccttgcatgaggtaggaacatcccattattcacatcctaaatatcatagtgtagattatgacgatagcacctaataagttcgtcgcactcgactacgagctgtacgtcggtgatgagaacgagcgtatcctgatggagcagaccacccccgaccgtcctctggagtacatccagggtatgggtatgatgctgcccgccttcgagaagcagctcttcggcctcaaggcaggggacaagttcgacttcgtcctcaagtgcgaagaggcctacggtgagccttctgacgaagccgtccaggagctgccccgtgagatcttcgtcgacagcgaaggcaagctcgatgctctggtcgtcgaaggtgctacgctgcccctgcacacgcccgacgggcagatcatccgtggtagcgtcctcgagatcaaggaagaagtcgtcgtattcgacttcaaccaccccctggcaggcgaagacctccacttcatcggctctatcaaggaagtccatgatgctacgcccgaggagatcgagcagttcttcggcgggcatgatggtggctgcggctgtggctgcgaccacgatcacgaaggccacgaagaaggtggttgcggcggtggctgtggctgccactaagcacgcgtaatcatagagcacggataccctgagccttaggctcgtgggcatccgtgctttgctatatcacccccttcacccgcccacgacgatgaataccttcggcaggctccttcgcctaacctccttcggtgagtcccacggacccgccctcggtggtgtgctcgacggcttccctgcaggcttcgccattgacgaagccgctatcgaggaagctctacgtcgcagacaaggcggacgaagcgacctcactaccccacggcgcgagagcgacaaggtacgcttcctctcgggtatctatgaggggcggacgctgggcgtacccattgccttcgtcatcgacaatgccgacacacgaagccaagattactcacagctcagtgacctttaccgccctgggcatgccgacttcacctatcaggcgaagtacggacaccgcgacccacgaggtggcgggagagcctcagcacgcgagaccgtcgtgcgtgtcgtcgcaggtgctttctgtgagcagtggcttcgagccgaaggcgtccacatctcggcctacctcagtcaagtcggtgctgtccactatgatgacagccatctgtatgaggcgattcatctcaccgagggcgataaggtgctcctccagagacgctatgaggacgtcgtaccctgccccgacaaggcgacagcagagcgcatggcagcagccgtagccgaggcacgcgatagccgcgacagcatcggaggggtcatctcctgccgtgtcgatggcctccccgcaggcttaggcgagccactctatgacaagctctccagccgcttggcctcagcgatgatgggcatcaatgccgctcgaggcttcgagataggcgatggctttgcactcgcctctgagtacgggtcagcggccaacgatcccttcgtccccaccgaagcaggggctatcggacagcagaccaaccactgcggtggtctcctcggtggcatcagcacgggtgcaccactcaccttccgcacggccttcaagcccacctcctccatcggtcgcgagcagacgacctgtcgcactgatggcacacccacccccctctctatcacggggcgccacgacccatgtgtcgccctgcgtgccgtacccatcgtcgaggcgatgacggcccttacccttatggacttttacctcctccaccgcgcctactcgactgcggagcgaggatagagaactatacatggcgagcgtagcagcaaaggaaagtatcactggtaccatcgtgacctacataggcgtcgggataggcttcctgacgaccttcttcatcttggccaagttcctcactcccgaggagattggcttgacgcgccttttgcccgagctggcgacacagctctcggggctgggcatgctcgggatgacctattcactcagtcgctacttccccttcttccgcgactccgagaccaacccctaccgtgctgaggatgggccgaaccacggcttcttctactacgtgacggtcgtcggggcgatcggtgccgtgctgatgacactcctctacatcctcgccaaggggcctctgatgtcgctctacagcgacagaagcccactgctcgcggacttctactatgctgtgataccgctgacgctcttcacgatgggatggacgatcttcgagctctacacctatcagctgatgcgtgtagcagtaccgaagggcatcaaggaggtactcctgcgtgtactccagctcgccgcctacctgctctatgccttcggctacatcgacttcacgacgatggtgtggggcttcatcgggagcttcggcgtctgtatgcttgccagcggcgtctacctcgggcagatcacctcgctaagccttcgccacaaccccagctacgtctcacccgagatgcgccgtggcttctatcgctatacggcactctatacgctgagctcggtgggcatcacgctggcagggcgtatggacctcttcatggtggccttcatcgaccgcggggggctctcctccgctggggtctatacgatggccttctatatggtctcgatcattgagatcccgatgcgcgctatcctcaatgtggcagctccgaagatcgccgaggcagcgaagcacggcgacacgaagcgcgtcgaggacgtctaccgcctcgtagccttctatcagctcctctcggggctcttgatcttcgcgatgatctgggtgaatatcgacaacatcttcggtatcatgcccaatggcgagcagttcaccggcggtaagtggattttcttctacctcgggctggcgaagctcgtcgagctgaccttgacctgcagccatacggtcgtcagcacctcacgctactacaagtggaatatctactacacgatcagcgtgctcgtgatgtcgttcgtctccaccgtcttcctcatcccagcctacggcacactcggcgcagcgctggcgatgctcctcacaaatatcgtgagctacggcctgcagcagctcctgctgagtgtgaagatgcacgtcagtcccttcaccagtcgtatgctccttctgataccgattgcagccgtggcgtggggtattgatgcgctcctcccgaccttcagctcggtatggatcgacctcttcgttcgctcggctctcgtggggctgggtctgctcctcgcgctcctggctctgcgcatcacgcctgagctgatgagtatgctcgagggcaagctccccaagcgcctacgccgctaatccccgacgacacgtgacgagcctcccgacaagtccccaaggcaaagcgccccttcgcgtgcttctgctctgcacctctgatgagggaggcggagcggcagaggcttgtcgccgcctacttgatgccctcacggctgtcggcatcgaggtacgtatgctcgtcgtgaagaagggtacggcggatgagcgtatcgcctccgtcgctgataccaccccacgacgcctctgggccaaggcggccttcctccttgagcgactggagatctacctccgcaacggccgctcacgtcagcatctcttccgtgtctcgacggcgcgctggggctgtgatatcgcttcgcacccgtgggtaagggaagccgatatccttcacctgcattggatcaaccaaggcttcctctccctcaccaccctccgaaagctcgctgccctcggtaagcccgtcttctctaccctgcacgacctgtgggctgccacgggcatctgccaccttcctctggagctggggcgtgagggcgctaaggagtgtccacgctaccaagcgggctgtggctactgccccctcctggcgagtaagcaagagcacgacctctcacggacgacgcttcggaagaaggctttcctcgcagagaagcccttccgctacatcgccgtcggcagtgccgaagtcaagctcttcgagcgaagcccactgatgcagcgctacggagcgccagctatcctcgccaatcccattgatctcagcctcttctctcctgagacagcgactgcgatacccgcacccttcacccgcaaggcggggcgctactacgtcaccatcgtcgcggcccgcctcgatgatgaagtcaaggggccacacctcctgatggagatcgctcagcagctccagctccgccatcctgagatcgccgagcgcacgacactcctgctcgtagggggcatccgccgtgagggctacttcgacagcctcgctcttccccacatcgccctcgggagcatccgtgaccgcgcacagctggcgagcctctatgccgcctcggacgtactcatctccacgagcgtctatgagaccttcgggcagacgctcgtcgaagcactatccgtgggcacccccgccttgagcttccgctgctcggggcccgaagatatcatcctcgacggggtcaatggctacctcgtccccgcctatgacacagcggtctatgccgatcgcctcgccgccctccttggacgagagcgagacgacgcaggggctttctccccccgcacctgccgcgagagcgcccagcgcttcggagcacctgccgtagcctcccaccttgtggagctctaccgcacggcacttgaccgagacagctccgccgaataatcacctataccctgactgctacgatgcaaccacgtatatccatcatcacgatttgctacaacgctgccagcacgatcacccgcacgctccgtagcgtctcggcacagacctatccgaacatccagtacctcatcatcgacggagcttctaaggacaacacgctggagctcgtccgcgagctggctcctgaggccgagatctatagcgaacgtgataaggggatctatgatgcgatgaataaggggctcgaccgagctacgggcgactacgtgtggtacgtcaatgcaggcgatgccctggccagccccaccaccgttgaggatctcgtccgagctacctgcacgggcgacagcctccccgacgtactctacggagacacgcgcctcatcgatgccgaagaccacgatctcgggctaagacgcctgcgcccccctcaccagctcgactggcgtagcttccgctcggggatgctcgtctgtcatcaggccttcgtcgctaagcgaagcatctcgccccactacgacctcagctaccgcttctctgccgacgtcgactggtgcatccgtgtactcaaggaagccaagaccacggccttctatcccgagccgatagcactttacctcaacgaagggacgacgacagccaaccatcgcgcctcgctcatcgagcgcttccacgttatgcgccaccactacggactcgtgacgaccgtcctgcagcacctgcgcttcctcgtcgaccgcaagcgctaagcctgcccctcccgactttattccgccctcttaccgaggtctgccccgaggctacacgcccatcggagcagacctcttccttatatagagagtgtgcagtaccgctgatcccaaagggtaagtataggtatagattgttgctccgcgtatggataaaagttacggacgagtagcagataagtttgggctacgtacctggctctaatatctacgtacgtggatatttggactgacgtgcctggtctttaagactacgtacatagacagaggaaaacctctacgtgaaggtgcttttttcttctcgagaaggacacttttccctccactggataagaggaatactcacgacaaggcgaagggcttgatcacttcggagaggtatatcggggagctgggcgcacaatgccttagcacaatttcctccaccgtagccaacggcttaccgctactcgccccttaatgagtacttttgcaaaagacagttcgctccatacctcaagaatggatatactcactcaaaacaactaagcactatgtcacttttcggcaagttcacaaagaaggagaacacgacttcaccctcctccgtacttcctacgatcatcgagacacttaataaagcggggtacaagtcacagcgtcaaaccgaatcctgtgtgggctatgacgacgacgggctctactgcaacttctgctatctcgagaatgatcccgagttcctactcgcacaggctaccttcgagcgcggagccttctctgctgccgacgaactgctacttcatcagatctgcgctaaggtgaatgcaagccaaaaggcaggtaaggtttatattgacggagagggagaactgacctttaccgtggaggccttcatcccctcgggtactcccattgatcttctcgcgctacatatgactaaagctctcggatcgacgattgcgttcttccaccgcacgtactgggatcttactggggataagggggaataacgcccctcccgaggtgcttgctcctccgccttagacgaccgatggtagggcggacacagaagaaatagtcggttaccctcatacaagtattcgtcccgcatacgaacgtgtagtcgttcgtatgcgggacgaatagtcgtttgccccccacagcaatagtggtccgcgtacacaccagtagtcgtctatgaattgacccgatagagcatcactcacgatccactctaattacggagtcgtgtagcacgagaagaggagctacaagggacttctgatatagggcaagtttgccgaataatccgcttcacgctggtagctacgtcctcgatacagcccaccgattttgatgcgcaagccctgcctccacacggagcttaaaaggctattaatctccaaaaggttatctttgtgtagaagcccatatagcgcaagctgcatgggtcattgtcgaatacaaaccaattttagttagagcaatggcactttttgataagtttactaaaaagaatagcgaggcagcgactctcgtcccctcatctgtactccctacgatcttagaagcactctccaaggaaggttatcgccccgagcgcgacaacgagatccgcatcgtctataagaacgaaggcatcttctgctgcttctactaccgtgaggatgaccctgagttcctcctcgtacgtgccacttttgagcgtgccgccttcgatgacgtgcacgaagccttcctctacaaggcctgcgctaagacggacttcgaccagaaggtcagtaaggcctatgtcgatgaagagggcgatatcgtcttctcggtcgaagccttcatcatgcctggcacgcccattgaccgcctcgcgctccgcatgagcgacgctctggcctcgacggtcgccttctaccaccgcgccctcaagcagctcgtcgaagagtacaacaaggagaacggtgacgatagcgagcccagcgctcctgtcactccgacgaccactctccccaactaatcacctcctctctggggagcttatagcaggctacgaagcgtagcaggagagcagcactccgacatcatatcacgtcatcttgacacaggacagcggacatttttggacaaatagccaagagtcaagaatattggcacgcgctttgctattcgtaaataaatgctaactttaccgctgtaaactcccactatgcgcctctccacccaggagagtgaaaagccgcagcgtgggcctaagacaacggatatatagaataataaagacgtactggacttatgaagacaatgaagctattcctcctgatgggagtggggctcctgtcaggtacggctgccctggcgcagaccgacaacaagtacctcgacgacgcctactatcgccgcagcgacctcaagaagatcgataaggaagagcgccgcaaggccgagctacgccgcgccgccgagaaggccgagcgtgaagcctgggaaaaggaacaggccgcactcatcgccaactacaagaagaagcaggccgatcgtgagatcgatgcatacaacgggcacctctccctgcccgaagacaccatcacgctgacccgtagcgagctgggtcgtctgctcaaggagcagcgccagaaggatggtggagcagaggtctacggcccctactcctctcgtctcagccgcttctatggagatggctcgatgacgatccagggtgctcgtcgcgtctacatcgacgcagacccttggtacaatgatatcgactaccgctatgcgggacccgatgtctatgtacgcgtagggagcagcgaccccttctggggaagtcgcttcggctggggtgccagctggggctggagctcatggtatgatcccttctacacctcctcttactactatggttatccccgctactacggtagctggtatggaggctactacgatccctactactatggctacacccgtggctactatggtgggtactacggctctcgctacggaggctggtatgacggctactacggtggctattaccctggctactactatggctatgccgcaggggctgctacgcgtgcctacaacgagcactactacaacaacccctactcgcacggggcccgctcgacgactcgccgcgcaagtggctactcagcctactccagcgtacgcgatcagggctacatcggcccacagcgctcctacgatcagggtagtatgtcacagcagggtcgtacgatctacagcgactatccccgcacgcagcagagccgtcccgtagagcagcagcgtagctacgacagctatcctcagcgcagctatgatcagggctcttcgaactcgacgaacaactccaactctggaggtggcggtggctacacggctcccccacgccgtcgctaaggcttgccctaagggtatatcgtttactccacctttattagattggataactcatgaacatcaagcataagatcttaggcgtagtggcactgagcctcctacccctatcactgagtgcacagagtgagatggaagccttccgccttggctctcctcatgagcctgtaggatcagcacgctatgctgccctctcgggcgctatgggtgccgtaggctctgacgtcgcttccctcgtacgcaatcctgcggggatctccctcttccgtgggaacaaccgtctctcgctgaccctcggtggtggcttcggtgccgaccgtggtgtctggtacggcacgtctacctcgcaggacatgaaggggaagttcctctttgaggagttctcctatcaggctggtacgaatagagcctcacgtggccccgtatccttcgccttcagcattcgcaatgcagggcgcttcgaccgcgagctccacgcttcggcagtactgcctcagagcgcgaacttctcctcgctggcagacttctctgctgcgcgtacgaacaacgctcgctacgacaatctgcgatcccctaacgtcgatagatacttcgagaagagctacataaccacgactgcagcctttaagaacgactatataccctggatgtctatcctcggtgctggcgcaggatggatcgatatcgacaacggcagcagaagctaccgctcggcttatatgtatagtaccgctcccgatgggacgccctatccacagcccagcatcggtctgcccgacaatgcggacctcgtactacgcgagaaggggaatatcaccgactacgatatcgccctcggcttcgaggctaacgatgctctgcacttcggggcggcgctcacgctctcctcactggactatgagatggcttcgtactatcacgaggctttccgtggcaacaactacctgacactgcaaaacactaagagtgtatcaggcttcggaggtagcgtcggactcggacttctctacgagcctgtcgaagggcttcgtctcggtgcttcgctctatacgcccaccttctactcgatgaagatggacttccaggcgagtagcctcggcgggtacaacaacaaggccaacgaagtcgtcacgcctaagagtgcagctaactcctacgccctgcgtggcaactggcgcttcgggctcagtggtgcgtacttcatcggtcgtcatggcttcatcagcgctgactatgactatacgagtggttctctgcgcctcagcaacagcacctatgacgaatatgatggcagtgagattggctttgaagaagacaacgctcgcctgaagacgaacttcggtggtgtgcacaccgtccgcctcggcgccgaagctatgcttagcgaccgcatcgccctgcgtgccggttatcgctactcctcttcgcccgtcaagaacgctcgtctccagggcgatatggcgtcgaccgaagtactcgtctcgggtcccgcggtacactacaccctccccgacagccagaatagcttctcgctcggtgcgggcttccgcatcacccccagcctctcgctggatctggcgtacgtctactccgatgccaaggctcgtaccttcgccttcccctacgtcaacgactacggctcctacctcaatgcttcggatgctgacatccgtgcaggtaaggtcaagcccgatgaactcgtaggtatgcaggctatcaaggagacgaaccagcgtcacaaggctgtagctaccctctctatccgcttctaataagaccaacgtggggcaggtgtctcggcacctgccccgcatattgatatcaaaatctccattacacacatcgcatgaacaactctcaattccccttccaggacgaaccactcagctcatcacgcgtcgcttatgacttccccgcactcgtacgtcagtctgtcgtacgtgccttcgtatggatggcgctcggtttggctatcacggggcttacggctctcttcaccgctgactcaaacctcttggactacctatttgagcaccaagggctcttttggggtctctgtatcggcgagcttgctctggtatggatcctctcgcgcaacatcatgaagttctccatcccagtagcgacgggggccttcgtattctactccgtactcagtggtgtcacgctaagccctatcttcatcgtctacacgggtgagtccattgcctcgacgttcttcatcacggcggcgaccttcggtgcgatggctgccttcggttacttcacgaaacgcgacctctcgaaggtgggcagctacctctatatggcacttatcgggctgatcatcgctaccttggtgaacctcttcctcaagagtgatacgctcatgtggatcatcagctacgtcggtgtgctcatcttcgtcggcatcacagcctacgacacgcagatgatcaagtctctggtagcagagtctatcggtgatgaagagcgtacgaagaagattgccctcctcggtgcactccacctgtacctcgacttcatcaacctcttcctctatctgctccgcatcctcggtagacgcaactaataagatctcaccgagatcacaatatagagggtgagctcccagacgggtagctcaccctttttttatacctttatctaacgataacagtgcagtagcactgatcctcctacattgtcgatccatctatgaagggaatagtcttagccgggggtgcaggcacgcgcctctatcccatcaccaagggcgtgagcaagcagctcctgcctatctatgataagcccatggtctactaccctatctcggtgctcatgctcgctgggatacgggatatcctcatcatatctacccccgaagacctacccgccttccgtcgcctcctcggcgatggtagcgactacggcgtgcacttctcctatgcagagcagcctcgccccgaggggctggcacaagccttcctcatcggcaaggacttcatcggcggcgactctgtatgcctcgtactcggcgacaatatcttctacggcatgtccttcacgcagaccctgcgtcaggctgtcgaggatgccgaggagcgcaatgaagctaccgtcttcggctactgggtcagcgaccctgagcgctacggcgtagcggagttcgctcccgacggccgctgtatctctatcgaggagaagcccaaggagcctaagagcaactacgctgtcgtggggctgtacttctacccgaactccgtcgtcaaggtcgccgagggcgtacggccctcggcccgtggcgagctggagatcacgagtgtgaaccaagagttcctccgccgtgagcagctcctcgtgcagacactcggccgtggctttgcatggctcgataccggtacgcacgactcactctctgaggcttcgaccttcgtcgaggtcatcgagaagcgtcaggggctgaagattgcttgcctcgaagagatcgcttaccgtgctggttggctcacccgcgaggcactcatcgagctcgctgctcctatggctaagaaccagtacgggcaatacctactgcgtgtggccgacatgaagtaatccccatccgcctcacttctccatgcagatcatccctacctcgatccccgaggtcgtcatcatcgagccacgcatcttccgtgatgggcggggctatttcttcgaatccttcagcgagcagcgcttcgccgagctcgtcactcctatccacttcgtccaagacaacgagagccgctccagctatggcgtggtacgtggcctgcacttccagctctcacctcacgcccaggctaagctcgtgcgtgtcgtccgtggacgggtacttgatgtagctgtggacgtgcgcgtcggctctccgaccttcgggaagcacgtcgccgtcgagctctctgaggacaatcatcggatgctcttcctgcctcgtggctttgcacacggcttcagtgtcctcagcgatgaggctgtcttccagtataagtgcgacaactactacgcgcccgatgcagagggagccatcgcatgggatgaccccgcactcggcatcgactggcagctgcccgccgaagccatctgtctatccgagaaggatagcaagcatcctcgcctcgccgaagcgccacagctcttcgactacagcccgaccagccgcctatgaagatcctcgtcctcggagcctcaggccagctcgggcgctgcatcgagcacgtcgctcagggcgctaccgacctctatcacttcgctacgagagagacgctggacctctccgacacctcggctatcgagcagttcgctacccgtgagggcatcgaagtcatcatcaactgtgcggcctacaccgctgtcgaccgagccgaagacgagcccgagcaggcggacgaaatcaaccacctcgccgtagcacgtctctcggagctcaccgagcgcctcggcatcttcctcatccatatctccaccgactacgtcttctctgggcgcagctctatgccctacacggaggacatgcccacggagcctatcggcgtctacgggcagacgaagcgccgtggcgaagaggcgatacagcgcctcgcaccccgccacatcatcctgcgcacctcatggctctacgctccctatggggcgaacttcatgaagaccatgcttcgcctcggtaaggagcgccccgagatgcgcgtcgtctttgaccaagtcggcaccccgacctcggcactcgatctggcacgctgcatcgtggggatcattgagcgtagacagctcgataagactgggctctacaacttctccaatgaaggcgtgtgctcttggtacgacttcgccgaagccatcttccgcctctcgggctacgacacgcagctccaccccatacgcagcagcgagtacccgacacgtgcggagcgcccccattactctgtcctcgacaaggcacgtgtgcgcgaagccttcggcatcaccatcccccactggcgcaccgcgctggaggaatgcctgcagctcaccgcctcactccccgaataatcctcttcaccacccactcatgcactatcaccgctcccttctcatcaccggcggcgctggcttcatcggctcgcatgtcgtccgacttctggccaataagtatccacagtaccacatcgtctgcctggataagctcacctatgcgggcaacctgaagacccttgaggatgtcgcaagcctccccaactataccttcgtcgaagcggacatctgtgactacgagcgtatgcgtactctcatcacggagcataccatcgacggtatcatccatctggcggcagagagccacgtagaccgaagcatctccgacccgttcaccttcgcccgcaccaacgtcatgggtacgctgagcctactcgaagctgcccgcgtgacgtggggcgctacgcccgagcgctttgaggggaagcgcttctaccacatctccaccgacgaagtctatggcgcactggagataggcgggggcttcttcaccgaggagaccaagtacgctccgcacagcccctactctgccagcaaggcctccagcgaccacttcgtccgtgcctaccacgatacctatggcctgccaacgatcgtgacgaactgctcgaataactacggcccgtaccagttccccgagaagctcatccccctcttcatcgacaacatccgcaagcgcaagcccctgcccgtctacggcaagggagagaacatccgcgactggctcttcgtcgaagaccacgcacgcgccattgacctcatcttccacaaggggaagaccgccgacacctacaatatcgggggcttcaatgagtggcgcaacatcgacctcatccacctgctggtgaaggtcaccgaccgcctcctgggcaaccccgaaggtcactccgaggagctcatcaccttcgtcaccgaccgtgcggggcacgacctgcgctacgctatcgactcatcgaagctacaccgagagcttggctgggagcccagcctccagttcgaggaaggtctggagaagactgtgaagtggtacctcgagcatcaagactggatcgaccacgtcagccagcgcgtgagctaagtctacccgctcctcctcgcatcaaacacaacgtgggctaccctcagaaggagagggtagcccacgttgtatttagggaaaaagaaaaacactaccataggatcactcacagccctcagatggaggcctaccacagcgacatcgcacggtaggtgatatgaacctatattggtcagcgagtcaagctatattggttcgctcacggacctatataggtcacgcgacgaaccaatactggtcgcgccaccgaccaatataggttcataccaccctcctctatagaagtgcatagccctttgccaaagctatagtcgatccagctcgccgaggctgctctccaccttattaaacttctgcttaccgaggctatagctaaggcgaaggatcaccttacgactttcgctaccgaaccgtgtagtcaggtccaatgcccccttgtgcccatagttgtcccagcgatcggtatggaagatatccgtcatcaagagcgagaggcgcaggcgatcatcagcccacatacggctaagcccgatatccagactaccattgggcttgatgacttcgtagctcccaccctggcgcttggagttatagcgacccgacaattcaaggttaagcccaaggggaagaaggatgctattgctcaccgacataaggtatgaggggcgcttgtattcctccttgtaggtctcgtagtccagcttattcacgaagtagtacaagccgagatttgcactgaagtcccaccacggggtaaggcgcttggagaagagtccctccagccccacctgctgctgtgccccgatattcttcgtggtcatgacggtcttcgtcgtcccgagcgcatctgtgatcgaggtgaagtagtcgtcgagcttggagtaagagaggttaagagagaggctgttccacacatagctcaggataagtttattgctaatctgtggcttgaggaaggggttccccttccaataggacaactcatcaagcagatactcaaaggggttaagatcttcgtagcggggcttatcttggcggcgactatacagcagggctaccttgctctgctcattgagggcataggagatactcaggttggggaagagtcgtaggtggctaccgctatgctcctccccgtcctgactggaataggcattgagcttgctggaggtgtgcatatactccagacgtagccccgcactaagctccagcttccccagagtatgggtgtactgcgtatagccctcgatattcccctcgtcatagtggaaggtatttgagcgctggttatcgatagctccattcttcttaaagaggaaggtattgtggcttctgatgaaggaggtcttagcaccagcgagccattcactctcatcattgggcttgtacttatagtccgccaggagcgcatagatatctatatccttgtcgggctgtgagtagaagaagtccgagcgcaccagcatgttggtcgcagagtagtaggtgttgggctgctcacagcgcgctgtgccgtcaaagcgtgtccagtctgcagtgatagagagctggtgcttgtcagatgggcgatagagatagttcaagctattgctgtagcggagggtcttctgctccacatagtcattacgcgcccgaaggatgccgtccagcgtagttgtcccttgatagacttgggtctccgtagctgtgaccccaggaccagcgagtagattcaccgagctattgacgaagagcttactcgtcggagtggcctgccaagagaaatcaatccccgccgaataggtattacgcatatcggtatctaccgtctcggagagatacttattcccatcctgaagcctctcatagccgtagtccatcgcatgatgcccgatggcatggttataattgagccccagttgccacttatctgtattgtaggatagagcgaggtccgagctctggcgaaggttctcccaataggcaaagctgtgtgaggtggtgaggtaaaagccagaccgaacggatgccttcgttatgatattgatgacgccaccagctccatcagctccaaagctggcattcggactcggggaagtctctatgctggagatctttgaggaggggagcgagcgtagataagccgatagctcttccccctttagcatcagcttccgcccattgacatatatcgctgtccccccgatggccgccaaggagatatcccccttgttgctcaccaagatgcccggagaatgcttcagcacatccagcgcagtccctatatctgtgaggtaagactgagcgacgtgaatccggatcttcccattggatgcgctggtcagcgagcgggacttgcgagcggtgacgacgacatcctttagggaaacatcctctacctccagctggatatcggggagtgtatcggccgaggcgatagctatctttctcttcacctccttatagcccagtgcccttatacaaaggaggaactctcccttgcgctggaggatcgaatactgcccagcagcatcagtgagtacggactctacgaggacatctcctggagaagctaccagcatgacgacggctgcatccactccctggcggttctcgtcgaggactctccccgtgacctttgtctgcgcacttcccgagatagcacagcctatcgccatacaaaacaggaagagccttagcgtaaatctattcattgctttagtggtggtggttacaagctcgctgggactgaccgccccacacttgtgatggatattgaggagctgcggaagcaacttgatattcccttatatgcaggtatatagcaaaggtacggttaattatatcgattttattaagccacaagtccacacggcgcccacatcaaggtgcaggctattcgtgcttgacacagcacttcagccgagcgtccgtgaggaagtggagtgaagctgtaggagagtgcgtcaagctatattggttcgctcacgagcctatatagagactgttgccgagagtcctgtcctctatttagagtgctaaggcattgcgcgcccagctacccaatatacctctccaaagtgatacacaagtccttcgccttatcgcgagtattcctcttatccagcggagggaaaagcatcgttctcgtgaagaaaaaagcgccttcctgtagtggtttttccgcatctatgtacgtagtcttaaagaccaggcacgtaaattcaaatatccacgtacgtagatattagagccacgtacgtagcccaaacttatctaccactcgtccgcaactttcacccctaagcggagcaacagcccaatataggtcacgcgacgaaccaatactagtcacgccatcgaccaatataggtgcatactaccctcctctataggacaactaagtgacaataggacctacggcttcgtagcttctattccttttctgctatttgcctcgaattacccgcttcgggcagagcgactacggggaaaaggtcgtacctttgtcctcacctattatatatatggagatggacacaaagaagattactgaagagccttacgacaaaaccgacctggacgaagctgtagagaccctgcgccgcggtgggatcatcctctatcccacagatactgtatggggtatcggttgcgatgccaccaacgaagaagccgtgcgccgtatctacgagctcaagcgtcgcgaagacagcaagagtatgctcgtcctcgtcggggagacctacgaagtcgagcgcatggtgagcgaagtccccgaggtcgcctatgaccttatggagctcgccgtgcgccccatcaccatcatctatccccacgccacaggcgtagcgcctaacctcctcggcgaagggggctccctcggtatccgccagagccgtgagctcttctcctccgccctctgcaagcgcctgcgccgtcccatcgtctccacctccgccaacatcagtggggagcctaccccactcttcttctcgggcatcagccccgagatcgtcgctggcgtagactatgtcgtcaagtaccgacagagcgacgagacgcctcgtgagccctctcagatcatcatgctcggtcccacgggcgaggtcaaggtcatacgcccatagccgctgcacacgccgatgtctgccttcagtcaagccatcacacctctgctcgatcgtctcatcagctggcgagagcgccacatcagcgagcgctacttcctcctcatcctgagccttctcatcggggtgacgatggcgcttgtggctgctctcctcaagttcatcatccacgtcgtcgagagcttcatcctccagaatatcgaggatcatcactacctctacctactcttccccgcgctggggatcctcctctccctgctcttcgtccgctacatcgtgcgggacgatatcagccatggggtgacgaaggtgcttagctctatctcccagcgtaagagccgcatcaagccgcacaacacctggagctccatcatagccagtgccctgaccattagcttcgggggatcggtaggggctgagagccctatcgtaatgacgggtgcagccgtggggtcgaacttcggacgtctcttccgcctcgagcagcgtaaccttatgctcctcatcggctgtggtgtcgctggtgccctcgggggcatcttcaaggctcctatcacagggcttgtcttcgtcattgaggtcctactccttgacctcacgatggcctccgtcctccctctcctggtcagctccgtctcggctgctgccgtggcctacgtcctctcagggaaggagatcctcttccagttcatccagaccgacccctatcatatcgagcgcatcccgctgatgatcctgctgggcgtggtgtgcgggctgatgtcgctgtacttctcgaagacgatgttccgcttcgagagcgagctgaagcgcatcaaggacatccgcctgcgctacctcatctcagcggctatcctctccctgctcatcttcgtcttccctccactctatggcgaagggtatgactcggtgaatatcctcttggacgggcagtacacgcagctcctcgatgggagtatcttcgaggcgttctcgaactcctactgggtcgtcttcgccttcttcctcctcaccgtcctcttcaaggtcttcgcctccgtagcgacgaactcgggcggtggctgtggcgggctcttcgctcctaccctcttcatgggcgggctcacgggcttcatcttctcctatctggtgaactacttcagttcgctcaacgtcttcatctcccctaagaactacatcctgctcggcatggcagggctgatggctggcgtgatgcacgccccactgacgggtgtcttcctcatcgcagagctctcgggcgggtacaacctcttcctgccactgatgctcgtgtcgctgacctccttcgccacgatccgtatcttcatgccccacagtatctactcactccgcttggcagagcagggcaagctcctcacgcatcagaaggatacggccgtactgacgctgatgaatctggagagcgtactggagcgtgacttcgaggtcgtctcccccgatatgaccctcggtgagatggtcagcgtcatctcggtgagtcaccgcaactccttccccgtggtcgatgagcgcggagtgctcgtcggcatcgtcgagctggataatgtacgcaacatcatgttccgccccgagctctatgagcgctacaaggtgcgtaagatcatggtcactcccgaggtcaaggtctcctcagcgaccccgatgacggaggtcatgcgcctcttcgacgagacgaaggcgtggaagatgcccgtcgtcgatgaggaagggcgctacctcggcttcatcagcaagagcgcgatcttcaatagctaccgcgaggtactcaactgcaccttcatcggggactaagtctccccgccccatatccccgtatgtataagcctaccgtcgtctacgaagacaaccacctcctctgcgtcagcaagcgccccggcgaaatcgtccagggcgacaagacgggcgatgagccgatgagcgaagctctcaagggttggctcaaggagaagtacaacaagccaggcaacgtgtacctcggcgtgatccatcgcttggaccgacccgtgggtggactcgtcctcttcgccaagacgtcgaaggcgctcagccgtatgaatgagctcttccgcacgggagacgtctcgaagcgctactgggccgtcgtcacggctcgcccgccgaagcactccgacaccctcgagcagtacctcgtgcgcaatgagtcgcagaacaagagctacgtagctcgccaaggcgctgcgacgcctggcgccaagcttgcccgactctcctaccgcctactggcctcgggcgaacactatcatctcctcgagatcgagctccacacgggccgtcatcatcagatccgttgccagctcgctgccctcggctgccctatcaagggcgacctgaagtacggtgctcctcgtagcaaccccggcgggagtatcagcctactttccagacagatatccttcacacaccccgtgagcaaggaagccctcaccctcacggctcccgtacccgacgaacggctatggcacgacctcgaagccgccatcgcgccgtaggtttggtgaattgagaaagtagtattacctttgcagtgctcaagcggaaagcagagcatttacatggtggttgtagctcagttggttagagcactggattgtggttccaggtgtcgtgggttcgaatcccatcttccacccccaaaactgaagagtgcttggcttattgaagtcaagcactcttgttttatatacacataccctcacgccgcctcgatgccccacgtgcagcacctctatctcttctctcgccctacggacgaagaagaccagcagctcagagcccttctctctgagacgataggcgctacaccgaaggtaagtatcacggacactccacagggcagactctacagctaccctacggagcgaagtgtgagcgagacggagctacgccgtgagctcctcacgcacctcatcccttgggggcgcaccacacacagcgccttctacctcccctccacgagtgccacagccgagatcacacacgtcgccttcgacctcgacggcacgctcacgacgacggagctgctgcccgagctggcacgtctctcaggtcgctcggaggagatgactgccctgaccgaagcggctatggcaggcgccacacccttccgtgagagcttcatgcaccgcactgagctccttcgtgggctctcccgtgaggcccttcactcggtcatccgcagcatcaccctccccactgacaccacgcttctcctccgcgagctctccctccccacggctatcgtcacgggagcttaccagcccttcgtcgaagatatctgtgagcgagtcggtctctccgcctttgtagggagcaccgtacgctataccgctgacggcgacttcgacggactcgaccccgagggtatcattgatgccgagggtaagcgtgccttcctcgaggagtggactgcaggggcgctcgcctcgacactctatacgggcgatggtgccaatgaccttgatgccctcgccgccgtagggcatgccctcttctacaccgcacaacacggagatctgcgtggcctcgtccatcagatcctctccgcagacctcccacccctcttcccgactacacgatgaacatccgcctcgacgagagctggcgtaccgcccttgcgcctgagttcgacaagctctacttcagcatcctcaccgaccgcatccgccaggcttaccagcatgaaggcccgatctaccccccaggagggctcatcttccgtgccctcgatgcctgccccctccctgcagtgcgcgtcgtcatcttaggacaagacccctaccacggtgcagggcaagccgagggcttagccttctccgtgccagcgggcgtccccatacctccgagcctcatcaacatcaagaaggagatcgcctccgacctcggccagccctcgaccatccctgacgggcacctcctgccgtgggcagagcagggcgtcctcctcctcaacaccaccctcaccgtccgcgccggtatggcagcgagccatcagggcctcggctgggagaccttcaccgatgctatcatcgagacgatcaaccgcagctgtgaccacgtcgtcttcctcctctggggaagccctgcccgacgcaagggaagtatgatcgatcgcacccgccatctcgtactcgaagcaccacatccctccccgctctcggctcatcgtggcttcttcggatgccgtcacttcagccagacgaatgcctacctcacccagtggggcaaggcacccatccgctggtgatacgctctatattgagtatatcaatatacctatataaagtcccgtgctttttgcgggagaattaatagtatctttgtaaaaaagatattaaacggctcgccacatcgcccctcggcgcaccgcctcactatacaaaatagagcattacagacatggacgtattacagatacagaaggacctgatcggtatgcaggactatatgaagaacttcgcgcgtacgctgacgaaggacgaagccgatgcagaagacctgacgcaagacactacgctgcgcgtcctgaacaactacgataagttcgtcgacaacgtcaacttcaaggggtgggtgctgaagatcatgcgtaatatcttcatcaacaactaccacaagctcgtgcgcacgcagagcttcatcgaccccaacgtcgacgcttacaacgtacctctgcttagcgaaggcgggcacaacactcccgagggctccatggatatcaaggagatcacgggtgctatcgccgagctgcagccttcactcaaggagcctttctccatgtttgtcgctgggtataagtacaacgagatcgccgataccctcggcatccccctcggtacggtcaagagccgcatcttcttcgctcgccaagagctccagaagaagctccgcgatatgcgctaagactcgcccctatttctatcaccatcacatatagactacgcaagtatgagtagagaacatcgccgctgcctcatcatcggctccggccccgctggctacactgcagccatctatgcctcacgtgccaacctctccccactcctctacgaaggtatccagcctggaggacagctcacgcagaccacggatgtagagaacttccctggttatcccgagggggtcactggcccagcgctcacccaggacctccgcaatcaggctctgcgcttcggtacggagatccgctctggtctggcgacgaaggctgacctctctaaggctccctacgtcatcaccttcgaggagggtgtcgaggtcgaagccgatacggtcatcatcgctacgggtgcttccgctaagtacctcggcctgcccgacgaagagaagtacgcaggtatgggcgtctcagcctgtgctacctgtgacggcttcttctaccgcaataagaaggtcgctgtcgtcggtggcggtgacacggcctgcgaagaggcactctacctggcgagcctcgcctcgcacgtctatatgatcgtgcgtaaggactacctccgcgcctctgatatcatgcgtcagcgcgtcgcagccaacgagaagatcaccgtcctctacgagcacaataccgtgggcctctacggtgaagatggcgtcgaaggcgcacatctcgtcaagcgcctcggccagcccgatgaagagcgcgtagacctgcccatcgatggcttcttcctcgctatcggtcaccaccccaactccgagctcttcgctgactacgtcgaggtcgacgaggtgggctacatcaagaccgaagggcctacgccacgcacctgcgtccccggcgtcttcgctgctggcgacgtcgcagaccccctctatcgtcaggcggtcaccgcagcggcctcaggctgtaaggcggctatcgaagctgagcgctacctcggcgaacacgggctctaagtcccactcccctatacgcgcagcgcccctgcccaccatcggtgagcaggggcgctgtcgttatatagccttcatcccactctacggggggacataaaaggaaatacccccaagtcctcgtaattggacctgagggtatctccctgaatctaattccttctctaagctcttcctcttggacttgaaccaaggaccctctgattaacagtcagatgctctaaccgactgagctaaggaagagtacttaatgcagcgtcagaaggggcttattcaccacgcccatactcgggagaagctcttcctcttggacttgaaccaaggaccctctgattaacagtcagatgctctaaccgactgagctaaggaagagtattgccaccttctttgttgcggttgcaaaggtaatataacttcttcatatacgcaaatgccttcccacttgcccgcaacaatatccatagccacccgcactcccatcgccgcctctacgcacgtctaccagcatcagccacccgccacttcttggcaaagaccttgccctctctcagacagctactgaaggaggtgctcccaacctatactggtcagcgagtcaacctatataggtcggcggcgtgaccaatataggtcacgaagcgaagctatataggtcaacccatcgacctatacagcttcacacaccgtccgattgtcaagcaacacccagccgggaagacagaagtggttcacacgattatacctcaccgaagtgatacgcaagcccttcgccttatcgcaagtacttctcttattcagcggagggaaaagcatcgttctcatgaagaaaaaagctccttctcgtagtggttttcttctatctatgcacgtagtcttaaagaccaggcacgtaaatccaaatatccacgcacgtagatattagagccacgtacgtagcccaaacttttctgccactcgtccgcaacttttatccatatgcagagcaacaaccgattaccataaccaccaaatgtgcagtagtaaacaagcctctgttgtgattagcttccagattccgtaccttcacacttgctaatacagcttgtagcgaatgggagataatctcgaagagttacctcagactgtatctgatgtgctaattcttgaggttatctccttgttctcttccactatactgtaaaaacatagctttccacgctcttggcgtacgattatgagcgaaggtgtcccctgaatactggtgcggaagtagtgatatctgaatggacgccccttaaagtccccagcatacccgatatagtcagaccttttgattagcatctcgatttctcttatagcgtcattcttcgccatgtagttcttgtgaggctgattgatggcttccttcagcccacccaccgtgaatgagatgggctgggcgaactcagggcgaacaatttctttcccgacaagcatcttcttcgcctagtctaatatgttgtgattagctttcagattccgtaccttcacacttgctaatacagcatgagcgtttcccttacctttctgatacaagttgtgattagctttcagattccgtaccttcacacatgctaatacagcagcaagctgtgttgcccacgtttcagtgaagttgtgattagctttcagattccgtaccttcacacatgctaatacagcgatagacctttatgtacactcgcttgtagagttgtgattagctttcagattccgtaccttcacacatgctaatacagctgtaagaagattttcatacacgctggaggtgttgtgattagctttcagattccgtaccttcacacatgctaatacagctgataggtcagagctcgtggtgaaaaagtagttgtgattagctttcagattccgtaccttcacacatgctaatacagcacaaagaagaagtgatagaactgccgagagttgtgattagctttcagattccgtaccttcacacatgctaatacagcgttcataccaacgccagaatagtcactatcgttgtgattagctttcagattccgtaccttcacacatgctaatacagcggtttacttctctaacgagagtgggaatgagttgtgattagctttcagattccgtaccttcacacatgctaatacagcagcgaagaggacttgttggtagacttgcgggttgtgattagctttcagattccgtaccttcacacatgctaatacagctggttgcccgacagatgcacctcgacgccggttgtgattagctttcagattccgtaccttcacacatgctaatacagcgaagcgttgccatcatcaccgacttcatatgttgtgattagctttcagattccgtaccttcacacatgctaatacagctagggggccgccatctcattgagctgagaagttgtgattagctttcagattccgtaccttcacacatgctaatacagccgacgggcagagcctcagcgtgagcgggctgttgtgattagctttcagattccgtaccttcacacatgctaatacagccaagtagccagatataatatatacgctattgttgtgattagctttcagattccgtaccttcacacatgctaatacagcagattttgggagaaatgaaagaggggacggttgtgattagctttcagattccgtaccttcacacatgctaatacagcccccgcccaaatctatggtagaggtgtagggttgtgattagctttcagattccgtaccttcacacatgctaatacagccgaccccacagagcaatctatgggacaagcacttagcagaaggatttagaaagagaaaagcccgtggatatccacgggcttttcctttacttagcgacttttccgattcaagacctcatagcatatcgaagagccctgggagctgaacggcatcggtcggcttacgcgaagagaagtgctccatcataccaaactgcttgtcagtaagcgtcatgatcaccacttcaccctcatcggggagcatcgccttgacccgccgcacatgcgtctgtgcctgctccatactcgcacaatggcgcatatagatggagtactgaaacatcgtgaagccatccttcaggagctcttggcggaagctggtagccgccttacgctccttaggcgtactcgtaggcagatcaaagaagacaaagacccacatgatgcggtattcacttagtcgcttggctcgcatgacaaaaggggataagccaagcggcgggcctcacccgcgaagcaacgcaggagcgaggtcgccgtctgcgtcgctgccagcatcagcggacgacgctgtccctcgatctctacatcaagcgtcggaagggcgagtagtcgtgccttgatctccttcgtcagctccgtagggaagccctcttcctcgcagatctccacgacgagcagatccacatagggacggtagggctccatgatatcgtctgccaggcaataggcattatacttattgtggtgatggatgccgagtgtggggaggaggccacagccgacgagggcccgtgcgatgatagctctaaggatggcatagccgtagttcaggagcgaattcggagctgcctcctctcgctcccgcacgaagcctgggagggagatgaagaggttgcgccaatagaaggccgcagcccgcgcctcgagattgtctgcatccccgctcttgacctgtcgggaccaagcgagcatattcttcgcaggctctcccaagacgatatgcagggcatgggcttggttgaggatcttcgcctgcaccgtctgttgccagagctgcttcctcagcggaagcgaagcatcgagctgtgcacggaagcgctcggtctggagcgtatgtccgtcaagcggtaggagcagtcccgaaggcatgtgcgtcgccgagcaggtcacgacagcgcaattattctcgagcaaagcccctaagagggcgtgggtgatcgtgatctgtgggtggtcgaggaggacgaccccgatatcctctatcggaatcgtccgtaccgtcgtctcacgatcatccgacggctgccgcacctccagctgcttgaggcgcagagagaggtaggcaggattgccgatatagatcgttcgcttcatcatggtagttggggagcatcagagcagagagatccgtccaagaaggtcgacacgcaccttacggatattcttctccttataagtcttaagccctgtaacacgataaaacttaggtatacgaccagagccgttcttcctatccgcaacactcgtttccaagtgatatcggtagagagagtcacctaaagagatcgcctgaacacgatagagatactcactgagcttgcggtagtcctgtgcttcgagggctcgctgaagctcttcatccgacagcccaatgataaccatctcatcctgctggagggagtcaacaaatacccaatcggaggctggcagtaagctcagtactgactctgggacatctccgcgctgtagtacttgctccatgacctcacgtggatgcgtaatgactaaggggataccatagcgtgcacggtctacagcgtcccagaaggtcacgatagactctacaagcttgcccttaggagtacgataaatcgccagatgatggttattgcgaggcgagacaaatccaacagcgtcgccctgctcatcgtacttcaccgccttcatcttagcccgatccagcccagtgaagcagcgcacactgcggatgggaccttgcgtacccgcttcatccatgtacacatctcccgcaaaggcttccttctccttacctccgtgctgtgcgagaaactccttcaggcgcttcctcagagccaagtcaacgacgtagtctacatccttagccttgaggctatgcagatcgtacttacagacgatctgcggctccccattgaccgtgatctgcccatagaccgtctccttcgagagcggaccacggggcactaagagtcccgactgcacgcacttcttcccgtgacggaggtagatattgcgtccgcgggtgacgacgcgcttccctgggcggtaggagatgaggatctcggcgaccttatcgctgacggcacgcaccgagaggtgagggcgctgcgtcagccagcgctccaagagggagagcttatcagtcttcgtcgccttctgtacctcgatctctccgctcatcgcctcacgctcgctctcggagcttacacgattgaggcgctggatatagccctgacgagtcgaagccacgacgagggcatcgatagcgtggtgacggtggtccatacgcttcgaccaatttgtgatgcgaagcttctcggtcgtctcaccctcacgagatacacgctccgtctcacccatcgagtcgtagcggtcgaggttgagcgtatggaggatatcatcatagccccagagactacgaagtcgggcagtcactccaccctcgctcgcagagacacgacggataccctgctggaggatggccatagcttggcgagagatgtactgcgtcaggcgcagctggcgctcgaggaagtcggaggggatatcctccttcatccagcgtaggcgctgatgcttgctgtaggaaatcgccttcttatccagccgctcattgatacgctccatatactcggcttcccagcccttcgcacggatgtactcgagagcggtgcgattgcccttctccttgttgcatcggcgacaggcgcaggtcttattgccgtaggagtcatcatagaggacggacttcgggatgatgtgctcgacctccatatcgtccccattgagacattggctcagcgtcaggatctgaccgcagtacagacacttttctccagcctccgcccacagcatatacttgcggatacgggactttgtcgggaaaagtccacactcacggatcttctctgcgatcgctttattctccttctctctacggcggttgccctctgccatacgctcacgctcctcacgcgacatcttcagctcacgtgccagctcgactcggacttcatcgacgccgtactcggccttgagtgcattgacgaggttgatcatctggttgaggatcttctcgacgaggggctgacgaagctcattgcgctgcagcagcgggatcttctccagaagtgtgcgctcggtgatctcttcgctggtggggctattcgagtggcggtagccgacggctgcgcacgcctcgctatagcccagcccctgctggagctgggggaggagcttgcagatgaacttcgcggacttattcccatagccaggcttgatgaagtccaggcgatagagctgatccaagagcccaccatccaggtcctcctccgtcatacccagctgcgtgatgagagcacggcgcatcgcatcacgctcctcgatggaatagaggatgtgccacaggcgataaaggggctggcggacgtagctatcggtgacgacggcaacctctcgctcggtgacctcgcccgtctcttcgtcggtaagctggacggtcatcatacgcgtctccagctccatatcgaggaggtggtgatactgcggatagggctgcagagccgaggcgagagcgacccgcgtgctattccccttcagtccactcttcgtggtaagctggtctgcgatgagcgccttctccttgagaagcttcttcagcgcagcgaaggatagcgaagcacttgactggagatgcgcgacgatcttagcacgctcctcgggtgtgatgtcgcgcggtgagccgtcgggacgggtcagacggatattattcaccgcctcatagatacggcagagctgggagaggggcgaggacttcggggcaaccttcgggccgaacttgaccctacgctcaatgagctgccgacctcccttgccgtcgtcctgctggacgcgcattaccttctcctgcttctcgaactcgcacagcgagaccaggtgcttgcaggacttcagcgggcgctgcatgaagatgacttcatcacgcagcatccggatgaactcgtccgtaaggatattgggatagtgcacgcgctgagccgccatgatctgatcgtactcatcaatgtagcgctgacgggagaagatctgatccttgatgcggtagctgatgccgcccgtggggctctcactctgattctgacggagctgctcggcgaagtactgccccaccgtcttgtgctcggcctggagcttctcgtcattcgcacggatgccagcgaggtaggcactattcgagtccttcttcttctcgccctcatctccgacgatggcagcggcatcactcttgacatgccgatagccacgcttctgattgatgtggcagagcacacgccccagctcgggcagcgtcaggcattcaccagctgtagccgcccgctcgcggagctcccatagctccagcagagggagctgaatgagtgcagcatcggggagcatcccgaacttctccagctctcgacgcaggcggtagcgacgcagctgatagcgggcaaagcctcggcgcatcgtgcggcgcgccgtccgctcttggttcgccgtgaaggccttcccgatagagaagtccgcagcatcggtagcattgtttaaggggacgacacggctccccatacctaagatttcggcaggatctccctgcgcatcgagggcgataaggcaccaccctattgatcctactccgaggtcaagaccaagtacatgtttgctcataagcattggttgtgttgatattaagaaaaatggctacatttgcagtaacgaaatctgaaagctaatcacaataaggatttattccgttgtgagaacatccagggtggggcctcttaagagaggttctcacccttcttttttgtgatcagaccgagaggtcaggccactacgatcagccgtagcactgaaacaaatgtagcaacttccccactgccgagcaagcaacaccgcatacatgagcgacttacatatcaaaaagggggccaccacaccctacttttcccacctctaaagcctgcaaacccaaggagcattctccactaagagaagggatataccacacatacttcatttatatctatttacatagacatattatacacaagcatttttgtaagggatatataagatatccatacaacctatcgtttatatcttgagcaggagaggaagcccgtcttacactccttccctaagtacaattcatttaacggaaccattactgcggagctggatagctcggtctaccctctctccgcctcatcatcaactacaagtaaaatggctacaaaacaatcatttcgccgactcggcatcctatctcttctcctcttctcctttgccttagtgctcagctcttgcggtggcaagagtgacctgccaggcggagaattcgggggcttcggcagcgcagacctcaagcaagaggtcacgatcaaggcctccgcaccagtccaggtcaacttcacagccaatacgctgggggactctgacatctaccgtgacggcaagctcgtctctcagtcgatctacaactccgagtggagagaccccgtcgcgaagtcccatcacacaacgttcacccacaagggttcagggctatacgtcggagtcatcgcaagcagacctaatagtggtaattcacccgcagccatcaaggtgaagatcgaggtcaagcaatacaatgggaacaagcacatcagaacctacgagaaggaagtgaccctcaccgcagagtctctactctcatcaacctcggagatgtaccaactccaggctagcgacagaaaaaagtagccagcttcacggcttaggagagccacgctctctggtacatcactccaagcaagatcccacttgataccgctccatccgagggtgcatcaagtgggatcttctcttttcgaggagaaggtacgagagctgtgaagaggcggtctggtgcaatggtctcctataggtatatgggtgcgtgggtagagctatataggatgacgaagaaagctatatagctttggactaattcctatatagcgttctctcgattcctatatagctttgtgaaatgacctctattaggttgttgctctgcatagggataaaagttgcggacgagtggtagataagtttggactacgtacgtggctctaatatctacgtacgtggatatttggatttacgtgcctgatctttaagactacgtgcatagacagaggaaaaccactacgggaaggcacttttttattcacgagaaggacactttctcctccgctgaataagaggaatacgcgcgataaggcgaagggcttgctcggtcacttcggagaggtctatcggggagctgggcgcgcgatgccttagcacaataaatagaggacaggactcgcggcaacagtctcatataggcagccagccatcggaccttcgccgaccgcccacgtagagtcgggagatgaggcgagctttgactaactttgtaagcgtaattcaaaaagacagagacaatggataatacaagaatgagccgaatcaatcgactcatccaaaaggaggtcagcgacctcttccgcatacagacccagagcatccccggcacactgatcaccgtgacatcggtgaccgtgagccccgacctcagcatcgctcgtgtacgcctgagtatcttcccctcggagaaggccgaagagctactcgagtcaattcgctccagcgcgaagaccatccgctacgatctgggcctacgcgtaggcaagcagctgcgtaagctccccgagctaaccttcttcatcgatgactcactcgactacctcgagcgcatcgatagcctcctcggactgaacgacaagtaacgatctccacactccccgcccctcgcccgtgctcagcttccgcatagccctccgctacctcttcagccgcacccgcctgcatgcagtgaactacgtgacggcactctctgccgtcgccatcgctgtcgtcgctatggcgctggtggctgtcgtcggcgtgtacaatggctatgtggcgatgatcctcggagctacaaagcaggtcgatgccgacatcgtcctgagagacaccgagggcggagtcttcgacctgaagaagttccccgactaccgcaccaagctcacgaaggcaggtgccgaagcgattgccctgcgcctggagagcaagggactcctacgtgtaggggagcagcagtgggtcgtggatgccgtcggggtagactcggcctttgcctccgtctacccgatggggcgtgcagctgatgtacccgagctccactcggcgacgaccctcgtagacgccgaaggtgcacccatcacccccatccagctcggcgcagcgatccagctcccgcaggatagcagccgcaccgagcacaacggtcccgctgccgaagtcctcttccccaagcgcctcggcttcaccaatcccttagcccccgcctcgtccttccagagcctcgaggcacgggtcatcgggcagtatcagcccacgagccaagagacggatgctgcgatctacctccccttggctgacctgcaggacgtactcgactatgaggagagcgaagtatccgctctcggcattcacctccgatcgggcgtcaagacctccgacttcaagcagcaggtgaaggtgctctacggcgaccgcctcaccgcccttgaccgcgaagaacagcacccagacctctcctacctcatccgtatggagaaggttatgacctatctcatcctactcttcatcctcctcctggcggccttcaacgtcgccagctcgctggctatgctcctcatcgagaagcaagacgacagccgtatcttcaccgctctcggtgcaccacccagcttcacgcagcaggtcttccgccgtgtgggcctactgatcgccctcacggggaccagcgtcggcatgctcctcggctggatactctgcctcctgcaggcacgcttcggcatcatccgctctggtagcggtatcgaagcgatggcgctccccgtggatgtgcgcccgctggacatgctcctcatcttcgtctcggtgacggcgctctccttcctcatctccctctaccccacccgcttcttccgccgcggttaggcgcattccgccccatcgtcttcacctccccctatacattattatatatagggtggtgtgctgtgcttatgaatgcggggaaggagggtgaagtgaaaagcaaaagatttgccacgataccgagggataacacacgattttcaccagctattttgccattcacacccctattcacacatagcggaaaagccgtgtagatgcgcttctttcctaagaaattaaaagaagctactacatttgtcaaggtaaaaatcattgcatatatttgctgtgaaatcaaggctcctacacgagccgtacacgcaaaactattagatcgatcagttatgaaatccgctgagattttggcctcgctcgaggcaaagcaccctggggaaaaggaattcctccaggctgtgaaggaagttcttctctctgtagaagaagtctacaaccagcaccccgagttcgaaaaggcagctatcatggaacgcctcgtagagcccgaccgtatcatcaccttccgtgtaccttggatcgacgatgcaggtaaagtccatgtgaacatcggctaccgcgtacagttcaacaacgctatcggcccatacaagggtggtatccgcttccatccctctgtcaacctctctatcctgaagttcctcggcttcgaacagaccttcaagaatgcactcaccacgctgcctatgggcggtggtaagggcggtgccgacttctctcctaagggtaagagcgaccgtgaaattatgactttctgccagagctttatgcgcgagctgtggcgccacatcggccctgacaccgacgtacccgcaggggacatcggtgtaggtggtcgcgaagtcgcctatatgtacggccagtacaagcgccttgctaacgagcacacgggtacgatgaccggtaagggcttcaccttcggtggctctcgcctgcgtcccgaatctacgggcttcggcgctgtctacttcgtacagcacatctgcaagcagcacaacatcgacctcaagggcaagacggtagctatctctggcttcggtaacgtagcttggggtgtagctcagaaggctacggagctcggtgctaaggtcgtcaccatctctggtcctgacggctacgtctacgacccagacggtatcaacacccccgagaagttccaggcgctgctcgacctccgctccagcggtaacgacgtcgtctctgactacgctaagaagttccccaacgctcagttcttcgcaggcaagaagccttgggagcagaaggtagacatcgctatgccttgcgctacgcagaacgaaatgaacgaagaagatgctaagatgctccacgctaacggcgtcaccatcgtagctgaaacgtcgaacatgggttgtacggccgaagctgctgagtacttcgtagaaaagaagatgctcttcgctcctggtaaggcagtcaatgctggtggtgtagctacctctggtctcgaaatgactcagaacgctatgcacctctactggaccaacgaagaagtcgatgctaagctccaccagattatgagcgacatccacgagcagtgcgtggctcatggccgtgaaggagactacatcaactacgtcaagggtgctaacgttgctggcttcctcaaggtagctcaggcaatgctcgagcagggcgtcatctaagaagcgacccttccctcaagtttcataaggcttacagcccgcattccccacgctcggggaatgcgggctgagcctttttatagcctcagcgaaacgaccgagaggagggagctgagaggcgaggctgatgcttgggcggaagaatggcttatctttgcgagcaaacgggagcgccgatgcttccatatcgcttgcacaagtcctatggcatatactaccctacttcgctgcaccctcgtcgcagcagccctcagcgcgggcaacgccttcgccagccccacgacggcggcaccgcgggctaagacgaatacctctatagaccaggcttaccgcgagagcctcacctatttctttgatcgccccgccacgagtatgatggaggctctccccctcggcaatggccgcctggggatgctctccgatggtggcgtacagcatcagaggatcaccctcaacgaaagctccatgtggagcggctcggtcgactccaccgcttggaacgccgaggcctacaagcaactccccgccatccgtaagctcctcctcgctggtcgggctaaggaagccgaagacctcatctaccgtaccttcgtctgcggtggcgtagggagcggacgcggacagggagcgaacaccccctacggcagttaccaagttggcggcttccttcacctcaattgggacaaggctcccgagctcagcggctattaccgtgggctgagcctcagcgaaggcgtcagcaaggagagcctcgtcgtcgacgggcaagcctatcgcacgaagcgcttgtacagcgtcctcggccgtgaggtacaggtcgtacacatcgcgaatcacagcgaagaggcccgccgtgacacgctccgtctctccctctcccgccccgagaatgggcaccccgcagccgaagctggcttcctgacgctctcgggtcagctccccgacggtaagggcggtcgtggcatgagctacgccatcgtcgtacgccccgtcctacctcagggcggtacgctcatcactcgtggcgatgagctcctcgtagtgaatgcccccacgatcgagctctacatcgcgcacaatacgaaccactacgataagcgcctgcccgtcatggcacgcagcatcgagcagacgctccaagctaaggccgtgggcgaagccaacctcttcgctgagcacgtacagcgcttcaccgcacagatggaccgcgtacaggcgcgcttcctcggctccgatccagcactctcgtcgctaccgatccagcgccgtctcatcgcttactacgagcaccccgagcgcgatccagcactggccgccctctatatgcagctgggccgctacctcctcctctccagcacccgccctggcgctctgccccccaacctgcaggggatatggaccgaaaccatccaagctccttggaacggggactaccacctgaacatcaacctacagatgaactactggcctgccgagaagggcgcactccccgagaccgtcggggcgctcacggactgggtcgagagtatcgtaccctcgggtgagcgtacagcacgcaccttctatcgcgctaagggctgggtcacgcacgtcctcggcaacgtatggcagttcaccgcccctggcgagcatcccagctggggcgccacgaatacctccgccgcttggctctgcgagcacctctacaatcactatcgctacagccaagaccgtgcttacctgcagcgcatctaccccgtgatgcagggagctgcacgcttcttcctcacgacgctcgtcaaggatcccaagagcggctacctcgtcaatgtccccacgacctcacctgagaacagctactacacgacccaaggcaaggccgtcgccgtagctgcgggctcgacgatggacaatcagatcctgcgcgagctcttctccacgacgcgcgaggcagcgatggccctcggtcgtgaccgcaccttcgtcgacagcctctccacggcactgcgccagatcaagcccaccaccctcggccccgacgggcgtatcatggagtggatggaggactacaaggaggtcgagccacaccaccgccacgtatcgcatctctacgggctcttccctgggagcgaaatcacgccccacggcacgcccgagctggctgaaggcgcgaagaagacactcatcgcacgtggctcaagcagcaccagttggtccatgggctggaaggtgaacttccacgcacgactaggcgatgctgagggtgcttatgaggtgctgaacatgctcctccgccccgtcgacgccatcgaccccaagacgaataagccctacggcagtggtacagagcccaacctcttcagctcgcatccgcccttccagatcgacgggaacttcggcggctcttcgggcatcatagagatgctcctcagcagtgagacgggctgcatcatcccgctgccggcactgcccaaggcatggaaggctggtagcatccaaggcctgcgcgtcatcggtaatgccacctgctcgctcagctggtctgcaggcgagcttgaccgcttagtcctcgaggcacaccacgcctatcgtcacacgctcctcctgcctggcgaaggtcgtggctacgtcctccgactcaacggccgcgccttagacacgaagacgctcctccaccaaggtcgcctgcgcctcccccagatgcaggctggcgatcgtctggaggtcgtgaagaagccctaaggcacgcacaagccactctatcacaggctctcccaagaagagtcacacaagtaaggggcacgaaccgaaattggttcgtgccccttacttatatccctctataccaagctctaatagagaggcattctgcgaccagtactgctcaccaatcgaagcagtactggttactaatatcaaccagtactggtcggagcgcaaaccagtactggtcactcgagtgaccagtactgcttgctttcccctcctcctgcagttgcttctcgcagactccacagagcaggataacagcagagcttacgagatcctcagttatagccattcgctgatacaaggtcagtaggtagattgacaaacgactattgctccacagtgcagacgactattgtggtatccttacctccccattgcttcgcgccactttccccaaggaagttcagctaacacgctgtattgagtaccaactgcttgcactttgatgcgtcagccctgaagggtagctggccgagatgtagctatttgcttctttagccgtatctttgtagccacgagataagcgtaataaagcctatggtcatcaagtctgcagagttcgtcatcagcaatagtcgcgtggagaagtgcccaacgacgggactccccgaatacgccttcatcgggcgctccaatgtcgggaagtcttcgctcatcaatatgctcaccgcacgcaaggggctggctatgacctcgcagaagcctgggaagacgcagctcatcaaccacttcatcatcaacgatgcgtggtacctcgtcgacctccccggctacggctatgcccgcctcggcaaggacagccgcgatagcctgagacgcatgatcgaggactacgtactggagcgcaaggagctggtactgctcttcgtgctcctggactgccgacacgatcctcagaagatcgacctcgagttcatccaatggctgggtgaggaaggcgtccccttcgctctggtcttcacgaaggccgacaagctcagcaagggtcgtctcgcagccaacatcgaggcctacaaggccaagcttcacgaagagtgggaggagctccccccgatcttcgtcacctcctcggaggagcgtatggggcgtgacgagctcctcggctacatcgaagaaatcaacactacattataatagactccacaaagtaagacaatgaaaggaaccattctcgtcactggcggtaccggctacatcggctctcacaccaccgtcgaactgatccaagctggctatcaggtcgtcagcattgacaacctgtcgaactccaatatcgaggtccttgatggcatcgaagcgatcaccggcattcgccccatcttctacgaggctgactgcaatgacgaggcagctatcgagcgcatcttcacggctcatccctcgatccagggcgtgatccacttcgctgcgagcaaggctgtcggcgaatccgtacagaagcctctgctctactacaagaataacttgctctcactgatcgtcctcctcgaggctatgcagcgccacggcactaaggggatcgtcttctcctcatcgtgcaccgtctacggccagcccgagatcctgcccgtcaccgaggaagctcctatccaggtagccctctcaccctacggcaacacgaagcagatcaatgaagagatcctcaacgacgtagtctacgctggtgtaccctacaaggtcatccgcctgcgctacttcaaccccatcggtgctcacccctctgcactcatcggtgagctccccaatggtgtgcctcagaacctcatcccctacctgacgcagaccgccgctggcatccgtcagcagctcagcgtcttcggtgatgactacaacacccccgacggctcttgcatccgcgactacatcaatgtcgtcgacctggcgaaggcccacgtcatcgctatcgagcgtatgctggacgactccaagggcagcgagcctctggagaccttcaacatcggtaccggccgtggcgtcagcgtgctggagctcatccgcaccttcgaggctgtcacgggcgtgaaggtcccccacaagatcgtcggccgccgcgaaggcgacatcgagaaggtctgggctgaccccacgaaggccaacaccatcctcggctgggaagctaaggaatccctcgccgacacgctccgctctgcttgggcttggcaggagcgcctcattgagaagaataagtaatataccgcatcatgcgtgccgaggggtaggacttttatccgtcctaccccttcgtatggtgcttagatagaaagaatatagatggagaagaacttcaagcgtaccctcatcaccgccgccctgccttatgcgaacggccccgtgcacatcggccacctggcaggtgtgtacatcccctctgatatctatgcccgctacctgcgcctccggggagaggaggtgctcttcgtctgtggtagcgacgagcatggtgtgcccatcgcgatcaaggctaagaaggaaggcgtgaccccacaggatatcgtcgaccgctacgacgggatcatccgcaagtcattcgctgacttcggtatcaccttcgatatctacggccgtacgacgagcgccacgcaccgtgagcttgcctcttcgatcttccgaaccatctacgataagggcggcttcatcgaagaagagagcgagcagtactacgaccccgaggccaagcagttcctcgcggaccgctacatcacgggtacctgccctcgctgtcagaatgagcgcgcctatggtgaccagtgtgagtcctgtggctcgacgctgaaccccaccgacctcatccaccccaagagcgctatctccggcgctacgcctgagctccgcaagacaaagcactggtatctgccccttgacaagcacgagcccttcctcaagcagtggatcctcgaggaccacaaggagtggaagagcaatgtctacgggcagtgtaagagctggctcgacggaggcctgcagccccgtgctgtgagccgtgacctcgactggggcatccccgtacccgtagagggtgccgagggcaaggtgctctacgtgtggttcgatgcgcccatcggctatatctccaatacgaaggaactcctgcccgacagctgggagaagtggtggaagagcgaagacacgcgcctcctgcacttcatcggcaaggacaacatcgtcttccactgcatcgtcttccctgcgatgctccgtgccgaaggctcctacatcctccccgagaacgtccccgccaatgagttcctcaatctcgagggcgacaagatctccacgagccgcaactgggccgtctggctcaatgagtacctcgaggatctgcccggtaagcaggacgtcctgcgctacgtcctcacggccaatgcccccgagacgaaggacaacgacttcacgtggcgtgacttccaggcacgcaacaacaatgagctggtagctgtcttcggtaacttcgtgaaccgtgctctcgtcctcacctcgaagtacttcgacgggaaggttcccgctctcggtgcgctgaccgacttcgaccgcgagaccctcgcagagctctctaccgtccgtgccgccatcgagcgtgagctggacaacttccacttccgtgaagccctcaaggaagcgatgaatctggcacgccttggcaacaagtacctcgccgacaccgagccttggaagctggcgaagaccgatatggagcgtgtcgccacgattctcaatatctccctgcagatcacggctaacctcgccattgccttcgcgcccttcctgccgatgagcagcgagaagctctgcaagatgcttgccatcgacctccccgcttggaccgacctcggccgtagcgacctcatcgaagctggacacacgctcggcgaggccagcctcctcttcgagaagatcgaggatgacgtcatcgaggctcagatccagaagctgcaggcgacgaaggaagccaacgaggctgccgaagatcacgcagcccccatcgctgagaatatcgacttcgaggacttcctcaagctggacattcgcgtgggtaccgtcaccgagtgcacgaaggtgcctaaggccgacaagctcctgcagttccgcatcgacgatggtctgggtggccgcacgatcgtctctggtatcgctgagcactacgctcccgaggagctggtaggcaagcaggtctgcttcatcgccaacctccctccacgtaagctccgtggcatcgagtcgcaggggatgatcctctccgcagccgatcgcacgacggggcagctccgcgtgatcacgcctcagggcccgatcacccctggtagcgaagtcaagtaaggcttcgcccctcccctgtttattcagaccaagaacccacttacatgaatagctctctcaagacgagtatccttagcccagtgcgctgggcaggggtactcgtcctcttcttcctcttaggctccgtagcatgggcgcagaagacgccccgtgtcacgcagcacaagctccgtatcctccacaccacagacgtccacgggaatatcttcccctatgacttcctcaatgaccgcccaggtacggggagcatgtcacgtctctcgacggtactgcgtgagatccgtcgtacggaccccgagaccctgctgctggacgctggtgacctcctgcagggtgagcccccgacgtactactacaactacgtcgacaccctctcgacacacatcgtctcctcggcgatgaactacctcggctacgatgcagtcgccatgggcaaccacgacatcgagcctgggcatagcgtcttcgacaagtggggacgcgagtgtaagttccccctcatcgcagcgaacatcatctccgacaagacgggcgagccttacttcaagccctatcacgtcttcacccgtgctgggctccgtgtagccgtcttaggcttcacgacgccagctatccctcagtgggtacctgcccatctctgggaaggacttcactttgacgatatcctcacctcggctgcacactgggtacccctcatccagcagcgcgagaagcctgacctcctcgtcgtactgatgcactccgggctggagaatgacaaccccgattacctcgagaatgctggccgtgcgctggcgaataagggtatgggcattgacctcctgctcattggccacgaccaccgtcaggagctggagtggatccgccctgagggaagcacgacggactccgtccttctcatcaatcccgctaaccacctcgatcgtgtcgcggacatccagatcaccgtgcgcaaggaaggtggtcgcgtcgtctctaagcagctcgtcccctccttcatctcacttgagggtgtagagccagactcggtcttcctccgccacttcgcccaggagtatgctgcagtgaacgactatctggctactgaagtcggtgagctggcctccgaggtgcgtggcgaagatgcgctcttcggtacgacaccctatatggatgtcatccaccgtatgcagctcgagtcggtgaatgcagagatctcctttgccgcaccgctgaagacctctgccgtcctccccgcaggcaaggtctatgtacgtgatctctttaagttctgtcccttctccaacttcctctacgctatgcagctcacaggtcgtgagatacgtggctaccttgagtactcttatgcaggctgggcagcgacctccatcaccgaagatggcgggctcatccgcctgcgcactggagcacagccgacggacaagtataagaccttcgtaccgccctacaactacagcgcggcgcaaggcatcgactacactgtcgacctctccaagcccgagggcgagcgtgtgacgatcctccgcctcacggggcatagcgagcccttcgacctcgaccgcacctatcgtgtagccgtcaactcctaccgtgctggtggtgctggaggtatgctcaccacgggtgctggcatcgcgaaggaagacctgccgaagcgtatcgtcggcgctacctcgcacgaccagtcctattacttagcagaattcttccgccgtcacaaggtcgtccgccccgtagacccgaagaactggcgcttcctccctgaggactgggcaaaggccgccgccgagcgtagccgtgccttcctcttccctaagaagtaagccttatgcgccttgccccactccttctgcttctggtacctcttgcgctggtactcctgcagcttctcttgagatggggccttcagcgccgctcggagcttctccgctcggcacatacacatcgacctctacagcgacaggacgcacctatcgctgtagaggtcgatgtcgattcgtccccactctttgatagccctgctccaagagaagccctcccccactacctcgtcctcgataccgagacgcaggacatcctccacgaagaggaggtagggatagagttcgccccctcgccgattatcctcctctcgtggcaggtgctggacgctacaggtgcctgcctctctgaggagacgcacctcatccgtcgtagcgcctccataacagaggaggctaccgccctgcacggcatcacgacggagcagatggagtgtgagggcgaggagctacgccccgcactggagcgcttgctccaagccgtgagtgaggcgaaagtactcgtcgcgcacaacgttcgctttcatcgtaccctcgtcctctcagagctggaagccgtagggcttccgacagcttcgctggaggcactacccaccctctgcacgatggagcgcgggcgagtcttaggcttcaagcgccgtgcttcgggtgaagcggcttaccctaagctcagcgaactcttcggctacctctacctacaccagccagccgtccacgtgcgcttccgccagaagggcctgcgtgacgttcgcctctgcgccgcttgtctcaggcagctcatcgtgtagcgcactccacgcatagctataaacagcgagcgggcaccccaccgatggtggggtgcccgctcgctgtttatggggattgcttcttagtcaagctcacctgcagagcgcttcttgaggaagttcttgtaggctgcctttgtctgtggagcgaggaagatgagggcgatgatattcgggatgaccatcagccctgtgactgtgtcggtgatctcccacacgaaggtcacagcgaagatcgccccgacgaagaccgagccgatgaccactgcgcggaagacatagaccccgaccttgccgaagagcgagcggacattcatctcaccgaagatatagttcccgatgatcgtcgtgaaggcaaagaagaagatactcacctgtaggaagatgataccggccttaccaaagaccatatcgaaggcctcctgcgtaatcgctgtcgactcgagtccagcctgcttatgggcacccgtgaggaggatgaccagcgccgtagaggtgcagatgaggagcgtgatgaagacacccgacatcgctacgaagccctgcatcgcagggtccttcacctcggccatagcatgagcgtggggcgaagtacccatacctgcctcgttggagaagaggccacgagcgaccccatagcggatggcatacttcatcgcgataccagcagcccccccagcagcggccttcgtagagaaggcttctctaaagacctcagcaaaggcctgggggatctggtcgaaatagatgcacatgatgacgagcgaacccaagatataggcgatagccatgaagggcacgacgagctcagcgaccgtggtgatgcgcttctgccccccgacgatcacgataccgacgatgagtgcgatacccacaccgacgacccaaggctcgatatcaaaggccgtcgtcagcgcgaccgtgatggagttcgcctgcaccatacttcccgtgaagcccacgtaggtaatgaaggctattgagaagaagagtgccagccacttgagcccgaggcctttgcggatatagaaggcggggcccccgatagctccaccgggacggacctcacgatacttctgcgctaagacggcttcggagaagatcgtccccataccgaggatggcggagatccacatccagaagatcgagccgacaccacccatggagatggcggtggcgatacccgctacgttccccgtaccgacttgggcagccacggcggtggcgagagcttggaaggagttgaccttggagttaccttcctcgcccttcttccgctgcatagcggggccgaaagcatacttcatcgccagattgaagtggcggatctgtgggaagccgagatagatggtgtagaagatgccgacgccgaggagggcgtacatcaggaagctgttccaaagaattccgttgaactctttgacgaaccctaatacatccatgtgctgtgagttttgtgagttagtgttagaggtattgtgaattgtggcttagacctaaggagtagatgcgtagggatcggggcacctacacgtagaagtgggtgctcctatcaggggtagcgctcgggaaaagagcggaatacttgagctattcatgcgcatcataggggcgctcctcttggtattatagaggggcaagccatacgtccacgggcgaagtgtccatggacttcgcctacaaaggtataaatagtgccggaagaaataaggtgcttagcccttgcgaccgtagtcggcggggatctcgccccagcggacggtatcccacttatacaagggtgtcgtgtaggtatgcgtctggagccagcgctcagcacgctcgatgaggtcgaagagctgagccgtctcggccgtgcgctctagaagggtcttgcagcgcttcttgcgcacccacccgagggccgtctggctgtcggagtagatgacgagctgcgagagcccctgcttctcgatgagcgccagcgcatgcacgatggcgaggaactccccgatgttattcgttcccttggggaaggggcccatctcgaagatgacccgacgcgaaggtaggtacacgccgcggtactccatcacacctggattgcccgagcaggcagcatcgacagcgagcgcctcctcgatgggagcctctgtgctactctccatccccgagggggcacggtggcgacgggagaagccctgaaagccctcttcataggctcgcagagcctcactacggctctcgaaggacttgaagagggccttgggatagccctgcgtctggcgctgacattccgcccaggtctcatagaccccaggctcgtgtcccgcccagacgacgtaccacttttgttgctttgccatcggcttacctgctcttggatgaagtcgtttcctgccgtctcccgtcgtgggagcggtgcccaaaagtacaacaatcccccgtgctaccgctccagcgcctataaaagcagcatcatccgagggcattcaaacgcctcaaagacaagaacaagagggaggctcacataccgagcggggaagtgcgctcgttttaatggtacacgtgtctcccgctccagcctttgctctgctcgggcatttagggagcgtaagacacttcactgctaacaagacaccacacatgaagaagatgatcttcaccgctgccctcctcttctactcgatgagcatcggggcacaggcgcagtccgtcgagagccaagcactcacgaccatcagcacacagcacgaggagcctactgtagagctcaccgatgctcccgtcagcacggagagcgactacctgatgagcttcgccgaggccgcaccacgtcgccgaggctattatggtggcggctcagccccctactactccgggacgctggagctcggctttacctccgccgaccgtctggggcgtatggagctactcggctccttcggtacgctcgtcagccccacgatctacctcggtgggggcttgggcttcaatggctacttctctcacaagcaccgcgacgccttctggatgcttcccctctttgtgaacttccgtgcgacgctccccacgaactccgtcgtcaagcccttcctcgacataaagcctgggtactccatcggccttactcactcagggctgcacggcttctacttcgcactctcaggggggatcgtcgtcaaccgcttcacgatcagcttgggttacgcttatcaggagttcaactccagccgctacttcgacaagtactggggtagctcgggcggggtatctctcaagttcggtatcctcttctaaggcgctcacagcgtgagtctgggcgggctaactcacgaatatttcgtatgtttgcccgcgaataaaagcaaagacccgtatgatacactccatgactggcttcgggaaggcctcggcacgcttcggtagccgcaccatcaccgtcgccatcaagtcactcaatagcaagcaggccgacctctcggcacgcattgcctccatctaccgcgagggcgagctggagctccgctctctgatcaccgaccgcctgcagcgcggtaagatcgacctctccatcacaatggaggatgacgccctcgagggcaacactacccccatcaacaaggaagctctcctcgggtacgtccatcagctccagacgctccgcacggagtcggggctggacttccccattgaccccgtcgccctgctgcgtctgcctggcgtcatggatagcgaaagtagccgcacgaccgaggtcagcaaggaggagtgggacgtcgtccgcgccaccacccgtcaggctgtagaggagctacaagccttccgcctgcaggaaggtaagatgctccacgaggtctgtgcctcacgtatcgcgaagatcagcgcactgcttgaggagatcaccttccccgaagctgagcgcatcgccgctatccgtcagcgtctcgaagagggtctcgcgaagatcgcccctcagggtggctatgacaactcccgcctcgagcaggagatgatctactacatcgagaagctcgacatcaacgaagagaagtcacgtctggcacatcacctcagctacttcatcgaggtactcaacgccgatcagcctggtcagggtaagacccttggcttcatcgcacaggagatcggtcgtgagatcaatacaatgggctcgaagagcaaccaagccgagatgcagcagctcgtcgtcaagatgaaggacgagcttgagcagatcaaggaacaggtactcaacatcctctaagccattctgcggtagccctcgctacccgactacatagaaaagccacgagcttcagcatcccacgcttggtggggctgaagctcgtggcttttatgtccgtgcgactctatcgtgaagtcgcaggtgagagcgagaggtcgcttagaagtgacgctctacgggctctacttcgggctgctggaagtcgatgaagcacagaccagccagagccgtaccatagcgcttctcgatcgtgatcccttcggtgacgaagttcagttcgccgaggtagtagtgaccataggtcttctggtgcaggtcgttgatcacacggatcagacgagcttcgagctcctcgatgcggtagcggccgctgacttcacaaaccagaccaccgaccttcttatcgaagttctcatcagcatacatccatgcgtagacgacacctgcagagacgaattcgtcctgctgaccgtgcgatacagccaggatggtcttcagctcagagccgaagggaggcaggtcgatctcatccatcgaagcgatgtgtgccgtagcgggcagcacggacgaatagaccatgatattaaagtcagagatcccagcatcatgcagagccatgtggtatgacccagcgtgaagttccagatccgactcaccgctccccttcgtcacgaagaaggtgtgggggataagattccctacgtacttgctcatttagttccttataaatctatgattgttaatacttattgcgcactctttccgcccattccgctatgcatacggctggacaaaggcttacaaaggtacactatttttaagaactttagctctcttattgacctctttctcgacacattccactgcttcgcagtgataagaagcggagctacaagtgtccttctcgtgaagaaaaaagcgcctttatgtagtgctttttccgcatctatgtacgtagtcttaaagaccaggcacataaatccaaatatccacgtacgtagatattagagccacgtacgtagcccaaacttttctgccactcgtccacaacttttatccctacgcagagcaacggcctacaatagtcgttcgactccagactaatagtcgtctgagcacagacctgtagtcgtctgcacagcgacctcccgagccttgcctacacacctctacaatcatgaggccacatatcgcaagggctgtatcgagaggatggcaccttgatatcctcctcggggctgtttgcagaagcccgtccctttgactatctccacaattctccgtaagtttgctccgtataaaaccaaagaccaagaccggactttcccaagtctatgccttgacacttgattaactctccttacaaccaacgccgatgagacgtcttttaccgctgttcttgttgtgcgtcttcttctctcagctgggacttagcgcccaggtgcacatgccagctatctacgggcggcacgagacgaagcaagtcgtgacgacagagaccttctatgactcaggcgggccaactaagaatgcccaccctctgggcatcgccgccgtcaccttcactcccaagtatggggaagctatcgaggtcgacttctccgagcttgatctcaagcaggccaccctctatgtctacgaggggaagcaagagctcgtcaagagcgaagggggcgacgaagatgatgagatcacctacaccaagccgaatgtccccgagctctatgtactccgaggcagtgatctctcccgtcatgtcttccactccacgacagctgatggggcgctgaccttcgtcttcatcggagccaaccccgcaggtaagggttggacagccgaagtgaagagcgtagccaagacctccgatgatacccccgtaccggccgagcctgagggctccgtctatatggtaccagggcctcgtgaggtcatagtaggaagcacaggacttgacttctacgacgatggtgggcccacgaaaaagatcagtcccaactttgagggctacgtgaccttcgtccccaagcaagcgggacagcgcatacgggtgaccttcaccagccttaagctcttccatacctacaagccgaagaacgacctactacgcgtctacaacgggcgcagcacctcctcaaccaagcttctgcgcgagctcctcaacgagcagacgcccatcagcctcatctccagcgaggacgatggctcactgaccgtctcactgaagagcgtcacggggactccgcaggacggcttcgtcgcacgcgtcgaggccatcacacccgagccgatgaccttcgcctcagcctcggcgacctctcccacagagaaggtaaagagcgcggcaggtgagcacgacaagccccttctacttctcaccctccacaccgaaggcgtgagccccgccctcaccctctcagagctggagctctccacccaaggcacgagcacaggcgccctggagcgtcttatcctctatcgtggcgagcaagccctcaccaccaaccgcataggcgaggcgaccgtcacgggcgatcaggtgcgcctccagctctccgctcccctcgagctgaactacggagacaacaccttcctcctcacgggcgacatctctgccaaggctcacacgggcgatcagctcagcctcaccgcacgcaccgcagtcctctcaggcgagacgaagcagctcaacctccccacccctaccccatatatcctcgacaacgtctgccgcagccgcgagggtcaaccccaggtcatcaccgtatattcggactggaccttcgctccgacgatgagcgctgggcgctatgccccaggcaataccgaccaagtcacgaccttcctcccagccaagacaggcgaggtagtcgagctggacttccagtccttcgatgtcctctacgagaagagtaagtatgggacgaaggcggtcttcgagatctacgctggtcaggggcgtacgggcaagctcctatggcgccttgacgaagagacgatgaatgcgggcgggcctaagctcatccattcgacgagctcggacggtgcactgaccgtcgtcttcaatcccaaggagagcatcccaggccgacagaagtcaggctggcaggctaccgtacgcagccagcagccccagcctatggtactcgtctcggctacggtcgcgcaggcctccacagccgaagcgcccgtaggtgctactggtctggagttcctcgatctcacgcttgagacgaagggcagccttcagcccaagaagctggaggccatcaagctccagctcaagggcgcacctcaagccttctccaagctctacctctacgccctctcaagccccaaggcctacagctcagccaagcttcttggctccgtcacgcccacaggtgagacgaccctcaccctgcctcttacggcagctcagacactccccgagcgcaagagctactactacatagctgccgacatcgcccagggcgtcgcagcaggtctgacgcttgacctcgctctccccgagatcacactctcaggagagaccgtctccattgagagccccgaccccgaaggaggacgcatcacccgcaatctcctctcgatggcagccggagagacgactattgaagtcaccaacccactctccttctatgataatggcggacccacggggaagtacccgcgctccttcaccggcactgtacacttcgtccctcgtgcgggtgaagtcatccactgccgcatacgccagctccgcctcggtcgtgtagactacctcagcttctaccacgggaaggaagccaacgaagacaagctcatcaccaagctctcaggctacaagcgcgacctccccgagctcatctccaccgcacccgacggctcgatgacagtgaccttcaccagcaagaccagcgatgatggctgggatatcgaggtcagctccgagcgccccatcccgctgcacgtcacggaggtcaaggccgaagcgatccaagatgcccgcctgatgaggggtgctaaggacgtccctctgatgaagctcgccgtcaccgtcacgggagaccaaggcgcgctgagcatcgagcacattgactttgcccccttctttgctcatggcatcagcgcttgggcaaagctcaacctctacgccactgagacctccgaagccttctctacagcgaagctctacgccacgggcggggagcgcttctcgggcacgaccgactaccacaagcctggcacgtactacttcttcctcgcagctgatgtagacgccaccgctccagcaggcgcccgcatcaccatcacaccccgtagcatcacggcaggcggtgaggagcgtgcgatcacgacgcccccgacagtagccatcgacctccacgaaggcatgcacggagacttcaccatcggcgagcgcagaggcatgcactacaccaccctcaccaccgccatccaggatcttgtcagccgtggtgtcgatggtcccgtgcgcctactcctcagtgctggcacctatgacgaggcactctccctgcccgatatcgcagggctgtccgagacaaacaccctcaccatcgagcctatctcgggtcgtcgtggcgaagtgacgctcaccaacacccactatcgcaaggtagactacggcgacaacaagcctggttacttcaacgtcgaaggggcagactacgtcacactccgcgcgcttaccttcacgtcagagaagagtgacgcaccagcactcctactcgtccgcaatggtagccagcatctcaccatcgacgactgtgagctctctgcgccccgcaccacactgtacaacgagggcgacatggcactcatccgcacggcacgcggcaaccagccttcgcccaacaacgacttcctcaccctaagcaactcgcacctcatcggcgggtacagcgcgatctatgccgacggactgtcgaacgtcgcactccccacacagcgcgtcatcaccatcgagggcaacacgctcgaggggcaaggctcgaagagtatctacctgcgctgtatccccgacatgaccgtacgcgccaaccgcattctcgcctcgggtaaggcggcacgcgactatcaggcgatggacctcactctcggcgaaggggtgagcgtcgtcgggaaccgtatccacctcacggacttctccgagacgacgaccgctgtacaagccatctacctcagacgcactacagagcatgcgcagatcgagcacaagtccagcctcttcgcctcgaatgagatcatcctcgatgcaccgcagagcctccgtgaggtctacgccttctacttcaccgatgagaacctcacggacatcaagctcctgcacaactccgtcctcatctcaggcactcgcaccgacaagtccacggcacctgtctacttgcattcgcgcaagcagggtaccatctcaaagctcgaggtgaagaacaacctctggcagaatctcactcctggctctatctacaagaccacgacaaagatcacgctcgtcgatcctaccttcactgacaacgtaagctacacggcaggcagcgacttcgcactgctcggagatagcgcccttgacctcgccgaatggacgagccgcatgaaggacacctcgagccgcatcgcacgagtggacttcgcagctcctcgtgagagcctcctcccacaggagttcagtacgctgaccttcgcgcgtgctctccctgaggtacctaccgatatcgtcggcacgaagcaccccactacggatgccgccgtcggggcttacgaagcgacgacgcacggcttccccgcactggccacgggctatcccaagcccctcaacctcacggcggatcatcccgtgctggagatcaagtccaccgacttcgggcagttcttctgcctggcgctcaagcagtcggatacggctcctacgctagaggctctcaaggcctcgacgctgcaggtcaatctctaccctaatcaggtcagccgcgtcacccttcccgcactcgatgggcactcggcctatcgcctctacctcctccctcgcaatctgtcggggcagttcgcctcagcagccctcacctacgacttctctaccgatgccctcccctcggaggtggcagacttcgagagcgtagccatcggcacgagtgacttcgtcagcggtacctatcgcttcgtaggcgggaaggtctacgagcctcagaagccctacacgacggggagccatcgcgccctcgaatgtagtagcacggtgaccatcacccccacgcacactacagcacccaccaagctcacgggcttctacctacagagtgatgtacccgtacgcctcacggctaagggtggagccgatggcgatcagacgaagactcttccctcgacgggcggcgtatggcgctacgtcagtctgcgtgacctcggcgaactcaccgagctcaccatccaaagcgaaggcaaggcaggtatcgatgacttcaccgccgagccacagccactccacctcaccccgaagaccttcacctctcgcgctggtgagaccatcgctctccagcatgatgccgagggcggtgtatggccctactcctatgtatggcgtaccgcagcaggggtggtcgtagggaaggaagcgacctacagcataaaggctgagcgcacccagcacctgacgctcgaggtgaccgatgcctgggagcagaaggtgaagagccagctcctcctcaaggtctcgggtgggaagcctgctatcgctaccttcgacgatctcggcctcgagcctgagacggcgtggtacggcgagcaggaagctgggggctccgacttcatctcctcgaccttctatagcgggagctactccttcgcctgtagcaatgcacccgcactgcgcacgtggatgggcttcgcctactccgaccagacgaagacgaccttcacctctctcttccccgaccagttcaatagtgctgtcgggcatggcgtgaatggctcgaagaactatgccgtagcctatgcctatcgccagccagccgagctccgcaccacccacgcagggcctgcggtcatcccgggcacctatgtcacgaataccgcttgggtcaagcaagtcacccagacggggacgaagatgggcagtgagccggatgcgcccttccatcagggggactatctgctcctcatcgccagcaatagcacaggtacaaagagccttgagatccccctcatcgactaccgcagcaccgacccgaaggagcactacacgatagacacctggcagtgggtcgacctctcggctctcggagagaccgatgtcgtgcgcttcacgatgaagggctcacgtgtagccaatggaggcacgaccatcccggcttacttctgtctcgatgacttcgggagcgaagtaccagcgaaggatatcgccccccgcaccctcgctccccaaagcacggagacccttgacctaacgaaggtcttcaccgacgcaggtctcgcccccagtgcttccccccaccccgtctacaccctcatgacggctgggaacgaagagactgtgacggcgaccctcagcggaagcaacctccgtctcacagcgaaggccacgggctcgacctcgctcatcatcagccagcgtcagggagggaagaccgtctacctccgcctacctctcacggtagccctgccccaacccacgccccagcctacgcctcagcccacaccgacccccgaggccgatggcgaactgaaggcatatcccagccccgctaccacggagattcatctcacggtgagcggacgcgtggatatcttcagcctcacgggtcaactcatgctcaccatcgagcactacacggcagggcaggccatccccatcggcaacctccctgcaggtatgtacctcgcacgcacgccccagggtgtcgtccgcttcagcaagcgctgagcctaagtccgcccgacgatacgatacaggtagcgcgtggctctccccctcgggggtgggtcacgcgctacctatttgagtctgttgccgcgagtcctgcccgctatttagtgtgctaaggcctcgcacgcccagcgccccgatatgcctctccgaagtaaccgagcaaccccttcgccttatcgtaagtattcctcttatccagcggagggaaaagtgtccttctcgtgaaggaaaaagcgccttcacgtagtgggtttcatttatctacgcacgtagtcttaaagaccaggcacataaatccaaatatccacgtacgtagatattagagccacgtacgtagtccaaacttatctgccacgcgttcacaacttttatccctatcgcggagcaacaacctaatagaggtcactacacaaagctatacggaatcgatccaaagctatatagctttcttcgccatcctatatatagctctacctacgtactcatataggtcgcttcgccgaccagtataggttactttttcaccctgcacagagtcgcggagcaagcactatggagacaagggggcaaaggggcaggatgccgagtgcactcccctacctcttcgggcaaaatgtggagggagatgcgatggcctcattgcacgcatcgggcacttttgcgcaatttttcataactttgtccgtactttcagaggggaatgccctcacgaggtacaccataaattatatatagataaggatacagagacagcaacgcatggctactattgtcaagacaaaagacctcatgatcgaggtggctcggcagctcttcgctcgggttgggttcaccaacacgacgatgaacgatattgccgacgcttcgaagaagggccggcgtacgctctatacctacttccgcaacaaggatgagatcttccacgccgtcatcgagcgcgagctcgagcgcctatggcacgacctggagctgatccgccgcctccccgcttcacccgaggacaagatcctgacgatgctcctgacgcatctggacaagatgaaggacttggtcctgcgcaatggctcgctccgtgccgagttcttccgtgacatctggctcgtagagaactcccgtgcagccttcgacgagaaggagatccgccagctccgcgagctcctcgaggaggggaaggaaagtggactcttccacgtccccgacacacgcctcacagcctacctcttgcagaacatcgtcaagggtatggaagtccccttcatcagtggggcttaccgctccaagggcacggtcgaggagatccgcgcagcagtacgccacctcctgctcttcggcatccgccagagtgaagaggggcccaacgaatccaactcttaatacgataaacaatgaatctacttgctaacaaggtagccatcatcaccggcgcaggccgtggtatcggccgcgctattgcactcaagtatgcacaggaaggtgcttccgtagtgatcactgacctcaagatcgacgagactgtagaagccttcgtcaaggagctcgaagggctcggtgtcaaggctaaggcttatgcctccaacgcagctaacttcgaagatgctcacaagctcgtcgaagaagtcgtcgcagacttcggccgtatcgacgtcctcgtcaacaacgctggtatcacccgtgacgggctgatgatgcgtatgaccgaagagcagtgggatctcgtcatcaacgtcaacctcaagagtgccttcaacctcatccacgctgtcacccccgttatggtcaagcagcgtagcggtagcatcatcaacatggccagcgtcgtcggtgtatctggcaacgcaggtcaggcgaactactccgcttctaaggctggtatgatcggtctggcaaagagcatcgcaaaggagctcggcgctcgcggtgtccgtgccaacgctatcgctcctggcttcatcatcaccgatatgacgggtgcgctctctgaagaagttcgcaagcagtgggaagtacagatccccctccgtcgtggcggtacgcctgaggacgtagctaacgtagctaccttcctcgcgagcgacctctccagctacgtctccggtcagacgatccacgtctgcggtgggatgaatatgtagtccacgagcggatacactcccatagccttcgcctaaggaaggcatataaagcataaggcttggccccactgatgtggagccaagccttagcttttatagtgaagtcggtgcgccttctgtgactaatagcggcgcagcgcacgacggggctcagggcgcttcatctccggctcatcgagagcgaagtccagctgacggcgtgccagatcggcctgcgccacgacgacctcgacacgctgaccgagggtaaacgtgcggcccgtatggcgcccgacgagacggaagttcgcctcatcgtagacgtagtagtcatcggagagatcacgtgcaggtaccagtccttcgcacttattctcctccagctcgacgtagaagccccagtcagccagccctgtgatgacgcccgtgaaggcctcacccagacgggggatcatatactcgacctgcttgtacttgatcgaggagcgctcggcattggcggccacgctctccatctcggaggcatggtcacactgatcctccagcgcagcagcatccgccgaaggcttaccctcgatgaggtagcgtgtaaggaggcggtgcaccatcaagtcagggtagcgacgaataggcgaggtgaagtgcgtatagctatcgaagccaaggccgtagtgaccgatatgcgtcgtggtatagcgtgccttagccatcgagcggatagcgagcatcgtcagcatatcctcctcgggcttacccttgatatcagcgagcagggcattgaggctcttagcgatgacggagcttccgccctcgaccttgagcttgtagccgaagcgacgcacgtagtcggccaaagaacggagcttctcctcatcgggggcctcgtggatacggtagacaaaggcaggcttgccaccacgccccaggcgaagggcagggctgatatccttgcgagcaggctcggctatacgctcagcgaccgtgcggttcgccagcagcataaattcctcgatgagctggtgggcgggcttactctccttgatgtatacagagagaggcttgccgtcttcgtccagctcgaagcggacttcggggcggtcaaaggcgatactccccacctcgaagcggcgagcacggagcttctgcgccaggcggtgaagcgtcaggatagcctctgcatagtcgcccttccccgtctcgatgatctcctgtgcctcctcataggtgaagcggcgctggctacggatgacggtgcgagcgatgcgtgctgagcggagctgcgcgtcttcgtcgagcgagaagatacagctgtaagcatacttatcctcgtcggggcggagcgagcagaggaagttgctcaagcgctcagggagcataggtatcgtacggtccacgaggtagacactggtggcacgcttgtaggcctcatcatcgatgatactaccaggctggacatagtggctgacgtcggcgatatgcaccccgacttcgtagcccccttcaggaagcgtgcggaaggagagggcgtcgtcgaagtccttcgcatcacgcgggtcgatggtgcaggtcagcaccccacggaagtcctcacgctgtgcgagctcctcttcggtgatctcggcagagagtgcttcggctgccttctctacggcctcgggatagctataggggaggccgaactcagcgaggatggcgtgcatctccgtagagttatcgccggccttaccgaggatatcgacgacttccccgcgagggttcttgctcttgcgatcccagtcggtgatgcgtacgacgaccttatcatggcccgtcgcacccatggtcttatcctcggggatgaagacatcctggcgtagctccttattgagcgagacgaagaaggcatagccacgagagatctgcagacgcccgacataggtcgcctcacggcgctccaggatctcgacgacctgcacacgcttgtactccccacggcgggtacgcacgaaggatacggcgacacggtcgccatgcagggcattagcgagcgcacgatcagagagagggagggtatcgatctcggggtcatcggggatgaaggaggcacggcctgcacgatagtcaaagcgcccttcgagacgctccttcgagaggccaccacggacgaagcgtccgggctccagctcctggatctcgccaccttcggccatcgagacgagcgtctggtagatggcgcgcttctgccccatattcgtcttaccgaaggcatggcagacctgcttgtaggtcagtacacgcccatcattctgctcaaataccaggcgtgcgatgcggaggatatcccgcttacttatggattgccctttgtctgtgccttgcttggagggtttccccttcttggcagagatgggcttattctttttactcatcattcaattctttatggataataggccactctcctacggcaggtatcgcggaggatacccgccgaaggaaggcggccaagggggaggtaagtgatatgtagctgtctgatgagtagtgggcggagcccaagagggggcgtgcctacgcctcagtggggatgacgagcttgtatcccttaccgtggacgttcttgatctcgacgcgagggtcagcatcgagcatgcgacgaagcttcgtcacatagacgtccatactacgctggctgaaggagttctcatgcccgccagtaggctcggtgagcccccagatgacgttgagcgcatggctacgctcgagcgtctgattggcgaagagacagagcagcgagagcagctcgcactccttggtcgtcaggcgacgtgacgtctcaccgagggagagcgtctgagtcgtcgtattgaagatatagcgcccgagctggtacacgcgctggggctccttctcgccctcgtgcttgatcgtgcggcgcaggatcgcctcgatacgcaggaggagctcctccatgctgaagggcttggtgatgtagtcgtcagccccagagcggaagccctcgaggatgttctcacgcataccgagggcggtgaggaagatgatgggcacgtcggccgagaggctacgaatgtcctttgccagggtgagaccatcacgcttaggcatcatgatatccaggagacaaaggtcgtacttagcgctcttgaaggcctcccatccctggtcaccatcagtacagagcgtgacggcgaacttcttactctgcaggagctcctgaaggatggtcccgaggttctcttcatcctcacagaggaggatctttaatggttcgtccatagtctttaatctattagctgtcgtagtttttaatctatatactgtataggtaggtaacgcaaaccgcttggtagcactactccggctcagaggccggtaggcgaatgatcatcttagtccccgcacccagctcactctcggcgacgatcgtaccgccacactggttgatgacggaggtcacgtacgccagacccaggccaaagcctcgcacgtcgtggcgcttgccggaggtgacgcggtagaagcggtcgaagatacgcttcagctcgcgcttctccatcccgatcccattatcctcgatggtgatacggatcttgccgtcttcgtcagcagtacggatcgccaggtgcaggggcacatcggggcggctgtacttgaccgcgttgtcgaggaggttgaagaagacgttggagaggtgaatttgatttccctgcacccacgtattcagggcatccaggtccagctccaagtctccgccacgctgctgggcgtggaaggtataaatctccgctacgggcaggagcagctcattgacgtccaagggctccagcgagaagcgccccgaagctccgtccagtagcgagaactgcagtaccttgtcgatgaggaacttcatacgctgcgcctccagcccgatgatatccagtgcactctgagctcgcggcgtgaggtcgccccgctcggcaagtgactgccccagcgactgactggagaggaggatggtactcacaggcgtcttcagctcgtgcgtcatattgttgatgaagctcgtgcgctgcgaggagaagctcatgtgcttgagaaggaccccaagggcggagaagccgaggacaagcacgatgattgtggagatgaagctgggcaatgccagccgaagcacctccgacttcgtgggggtgacgtcaagcgtgaccttcatatacgggcggtccagctcagagccatcggtcggcacgaagagatactgcaccaccgtattgcgctcttcccatcgcttggaattgaccatcgctggggggatgtactcatagagcgtacgtccctggtagtcatgtagcgacatcatgtagggcccgcagagatccttattgtccagatgctcacggatgaggctcttcaagagacgcacattcaccatctgcgggatgctatccttgttgtagctatcatatagatacttcaggatgtagcggtcaagcgcatggacgttggcgaagtaggcgtgtacaaggcggtcggacggacggtagtcgacacgactcgtattccccttgtgtggcatcttcaggtagatgttctccctatccagagcccgctggacgatctgggtatcgagcttggtgcgcgtccagatatcgaacgaagcgacagaggtcggtaggaactcgctgtcctcaaagcggtcattcttgcgattgagccccttattgaggtagcgtatcagctcacgcacctgtagctcttctgccacctcgcccatcgcttccttcatctgattgcgaatcccctcggtgcgcagctcaagcacgcgaccatagtattcgtattgcacccatgagaggagtccataggccgagacaagggccatgacgatgatccagatgactcgttttctcatgaacgatgcggtagctattgggagtgacgactaaagagacacattactgttattatatgcaaagataagcatttctgcccttcgcaccgttaattccttttcaaagcgtcaaagacaccccctttcttcctcactcacacagcgataaggtaaagatatgtcaccttgaaattcgcttacgaagcagcatcctaccgacgctacaccacgcggtctccacccgccactactcagagagcgcaaagccaactcttcgcctttggagcaaactcctcaccaccaagaagccggctcattatgacgaggttaggcgaagtcgtataagctcccttttgcgaccactactggtcacgaagcgaagcagtactggtcgctattagttaccagtactggttcgacgagtgagcagtactggttgcctcgctgaccagtactggtagaaaacaccccctcccaatgcgtacaccttccttctcctgcacatataatatataaggagtcgtatggggcataccgtatcagcgcgagaaggtaggaagcgataagcggaatacaaacgcgcaccgatgagaggaacgaaagcccacctccgcgaagacctattcttaaataccaaaaccaagagcgccacgttcctttgatgcacatcaaaaaccaaacgagcttcctaaattatttaaggttatttcgccccccaaaacgccccatcccaaggcctcccgatgagaaaatttcgcccatagcaagcccacatctcagacaagtaagagcaggagaaagagcctacacccacccacgcacatatacatactgtacagacacttacagctgtacatctatacatcttttcctcctttttacaggccgcgaaagtccccacaggtagcgacaaatcgccttcttcaccgctccccatggcaccctactattggataggaaataaaaatctctacatttgaaaaaaggatacgctggagcatgggcggggcaaccctccctttaggagaaagacataacgtgaaagaccgcgaggatgacacctccagagtaccctatgaatagatagtaatcccaagttacggctcaaagcaagtacgcacatatcacactaaaactactattctcatgagaagagcacttttcttcctcctcgctctcttcctcttcgcaggagtgggttggtcgcagaagaagacgatcaccgtcacgggggtcatcatctcatctgcggataaggagcccgtcatcgcagccagcgtgtcctgcgtcgagttccccaccacagggactctgaccgacgtcaacggacgcttcacgctgaagctaccagatgcagctaagcaccttacgatcagctgtatcggattcaacaagctcaagctgcccatcgcctcgggtgagatgaagatcaccctgcaggcagaagagcaggtgatcaaggacgtcgtcatcacggggtatgggaacacccgcaagtccgccttcgcaggctctgctacgaccatctccacgaagaacatgaaggacgtgcccaccacatccctcgaagataagctcactggggctatcgcaggggtagcagtgaactccaactcgggtcagcccggtagcatcgctaccgtgcgtatccgtggtctcggctctatcaacgcaggtagcgacccactctacgtcatcgacggggtacctgtcaataactccagcgcctcagtcttcgactacgctaaggggggtatgagcccactctctacgatcaactccaacgacatcgagaatatcaccgtcatcaaggacgctggtgctgcagccctctacggctcacgtgctgctaacggggtcgtcgtcatcacgaccaagagcggtcgtgctgggaagacgcactacaacttcaaggccgactggggtagctccgacatggctatcgactaccgtcctaccctcagtgctgagaagcgcaacgagctcatccgccacgggtacaccaagtactacagcgagctccgcgacaagacgacgaatcagctcctctatcccaatgccaccgacgtagcggctcaggtagagaagaccatcggtaccgctatcgctaagccttggtctggctacacggactggcgcaagatcctcctccgcaatggcgcttcacagaactacgagttcagcgtctcgggtggtggtgagaagacgaagttctacacctcgatgtcctacgctgaccagaaggggatctcactggcctctgacttcaaccgtctgactggtagcttcaacgtcagccacaccgaccgccgtctggagatgaaggctcgtatgctcttcgctaagaccaagcagcacaccagcagtgaaggcagtgcctacgctaaccctatctacgggatatccgctacgctgactccatccaactatcccttcaaggaagatggatcttacaacagcagcttctcggggaacaacaacatcaaccccctcttcgccacgacgcaaaacttctccgaaacgcagctcgtgcgcgtctacccctctctcgaagcttcgttcacccttttcccctggctgaagcttcgtcagaatgtcagctacgactacatcaactccgaagaagccgtctggtgggatcctcgccaaggtgacggtgaagctgctaacggggtcttccagcgctccaaccttgagcgtgctaccctctccacacagtctcagctctacgctaaccatgacttcggcaagcaccacctctctggtgtagccagcttcgagtccgaagccttcgaccggctgaacgtctatatctggggtactgacttcccctcttacctcaagtacgaactggggaatgcagggaactcaagcggtagcaccgaagtcgacaagacccgcatgctctctttcctcgtcaagggggactacgcttacgatgaccgctacatcttcggtgcttcggctcgctgggacggctcttctcgcctcgctcctgctcaccgctgggggctcttctggtcactctctggctcatggaacatcggtaaggaaaagttcatgaagtctctcgagcccatcctctccgacacccgcctgcgcctctcttatggtgctaacggtacgctcccctacggctactacgatcacctctccctctacagcttcggctacaactacaacgggggtacgggggcttcggaaagcgatctcggctcacccaacctctcttgggaaaagaacaaggctttcaacctcggtcttgacttccgcctcttcaaccgcgtcggcgtcaccttcgactactacaaccgtctgactaccgacctactcctctacaagaacatctcaggtacgacgggcttcagtagcgagctgcagaacgtaggtagtatgcgcaatacgggctttgaagtcgaactgcgctcgaccaatatctctacggacaagttctcttggagcacgaccttctccctcggccacaataagaataccctcctgcgctacgacggcgtacaaaccacacgtgtagaccgcacttggatccacgaagttggtcacccctacaacgcctactatctggctgaatacgctggtatcgaccccaacacgggtaaggtacagtactactccaataagtacgacgaagccacgaagacctacgaccgctccatcgtcacggagggctctcaggccaaccgtcgtcgtatcgatgacaagccctttgaccccaccttcactggcgggcttatcaacaacatcacttggggccccgtcgacatcaacttcaccctcagctactccctcggtggctacctctacgatagcgctaccgcgctctaccaggacggtaacgaagaagtgctgaacctggctatccccaagtactacgacatcaataagatctggaagcaggtcggtgacaagacggagcttccctccttcgagcctacgaatacgtatacgtactcgacccgcttcctgcgccccaccgaccacctgcgtctgaagaacttcaccatcggcttcactgctcctaagcgctggactgagaagatcggtgtcaacaccctgcgcctctacgctgcaggtaacaacctcctcacgtggaaggataagatgctcgtcgtcgaccccgagcagcgtggcttcgtagcctacggcacgcctcccctgcgcaccgtcaccttcggtcttcaggtcggtatctagtctattgctaaccacacaaatgacagttcaagtcttatgaaaaggatcatcataggcctcgtggcctccctgggcctcgtggccagcatctcgtcctgtaagggttacttcaacaccgagccttcgaacgccactggcacggagaaggcgctcaaggaagcaagcctcctacagccctccctccgtggtctctttgacggcctccagggaggaagatccagcacctcatactacggtcaatccttcaccatcataggggatgtacgaggggatgatatgcagtgccccaccgtaggctcccgcgggaataattactacaagatggactatacccgtagcaatatcacggggccttggttcaagatctacaatacgatccgtcgtgctaaccgcctcctgcagatgtgcgaaaagctctctcagggagcttcagccagcctacagaaggagatcgctaatgccaaggcacaagctcaggccgtacgagcactctgctacttcgacctctgccgtgtctacgctacgccttatccctactccaatgatggggctgcgctgggtgtccccctcatcgagggtatccccgacaatgctgctacacctggtcgtaacaccctcaaggagtgctatgacttcatcatcaaggacctcacggaggctatctccagcaatgcccttgaggataccagctatggctacatcagcaagtctgcagctaaggcacttctggctcgcgtgtacctctacaagggagacaccgagggcaatacgaaggcactcagcctgagcaaggaagtcatcgacagtcacctctacgagctcgctaccgatgtcacgacctacaagcaggtatggagcgaagccagctcgaaggaaatgatcttctcgatcgtgaacttcgactctaaggactgggctgaccgtgaagggcttgcctacgtactcaacgtcaacgggtattacaacgccttcatcacgaagaagttctacgaagagatgaaggaagacgacaacgatatccgctggaatgtcctctgggcaagcgaaggcacgaaggctgaaggggtcgtgaagaacctccccgacgctacgcctgatatgaagatgttcatcgggaagtaccctggtaaggcagccctcaaggatatgcgtaccaacgacatccccgtcatccgtctggccgaagtctatctgaacgctgctgaagctgccttcaagctcggagatacgtctaccgccctgaattacctcaacgtcatcgtcaagcgtgctaatcccgccaagagcgtcgctgcaggcgacctcaccctcgctcgcatcctcaaggagcgtagcaaggagctcgtcggggaaggccaccgcttctatgacctgatgcgtaatggtcagacttgcgaacgcttctataagggtcttcccggctggcacggcgcactgatcaacgaagctcgctccttcgaccacacgtacttccgcacgatcctccccatccccgagagcgaaatcaatgcgaatgctacgctgggcaagcagcagaaccctggttactaagcctcttagagggtgggcatcgcccaccgctctgaagtaaccccactatagcatctccccccgtcactcgaatagaggtggcggggggagatgccgtttttagagaagagcaaagcgccccgaaagagaaggtgcgcaaagctatatggatcgctgaatgaacctatataggtaggctctctgacctatataggtcgccatcacgagcaatatagattcacccgacgacctatataggttgttaccatcctctacgacggggagcatcaccgactcgggagcaagcccatcaaatcccacataggaagagtgtaaatcccctgcaggaagcgcgacttcccccgaaggtgcatttccctctatagccctaaaaagtgtatctttgtgattaataaattggcgatagtagacgtgcccaagatcgtagataagtatatcctccggactttcatcccgctcttcgtgatgagcttcgccgtgtgctggttcatcgtggtgatgcagttcctctggcgctacatcgatgagctggtcggcaaggggctaagtggcttcatgctgctgaagattatcttctatgcggccctctccttcatccctatgtcgctcccgctgggtatcctgctggcgtcgctgatgacgctgggcaatctgggtgagcgccttgagctccttgcgctcaaagcctcggggatccgcctctaccgcatcatccgccccattatgctcctcgtcgtggcgatggcatgcgggctcttctacttccaaaacgatctgatgatccgtgcccaggtccgtatgtggaccctggtcatcacagctaagtatgcagcccccgagatggagatcaccccgggggtattctataccggtatcccaggctacagcctctacgccaagagccgcgatgcgggcacagggctgatgcaccgcatgatggtctacgatatgagccgtggctatctcaacccgcgcatcatccgtgccgactcgggccgtctggtgatggacaagagtaagaagttcctcgtcctcaagctctaccaaggtcagagctttgagaacatccagacgcagagctacaataccgtcagcgagcccgtcccctacatgctccctcactttgactacagtgagaccttcatccccttcgacgccaatatcaagatgcaggacgagggagagctcagctctatgtacgtcgggaagaatctcaatcagctacaggtatccattgactccatccgccccatcctcgacagcacgcgcaatagctacgctcgcatcgtgcagtccgacctcttgaccagccactacggcttctccccctacgcctacgaggataccacggtcttcgcccgacagcaggagcgtatcgctaccctcgtgaaagagaccagcggagtgaagccggaggaagccaaggcctcactcacactcactgcacaagacagcctacaggctatcggctccgccctcgacaaggcaaagcgtatcacggaggaagcccagatctatacgggtacggacgacacagagttctatcactaccgcaccttccatcaggagtggcatcgcaagttcaccttccccgtctcctgtatcatcttcgccctcatcggcgccagcctcggtgccatcgtacgccgtggagggatcgggatgcctatcatcatctccatcttcttcttcgtcgtctactttatcatcgactccttcggcacgaatatgctacgcagcgagtcgatacctatctggctggggatgtggctgagtaacatcctcctcttccctgtcgggatattcctcgcctacaaggcaaaccaagactcttcggcgctcaacgtcgaggcctacgtgatcttcttccgcaagctcttcggcttccgcggtgtccgtaaggtcgagtatcaagagctcatcatcgaagaagccgactacgaggctggtgctgccgctgtggtacaagccatcgcgcataccgatgccctcctccgcagccccatgctctcaggacgtatctggcagatctggagccacggagccgagcagcaggcactggcagccctcagcaaagagcttgacgctatcaccgagagcctgcgccacacgccctcacgactcttggtcagcaagctctgcgacctcccgctcctccccactcgcctctcgcccttcctcccagaggagccgcgctggggccgtatccttggggctatcctccccatatctcttccgtttggactcttcctctcacgagtacgcacccacctcaaggctgaccttcgcacgacacgcacggtgctcacgcagatcgccgaagaggtcgctgtagccgctaagggagtccatcgtcccgcacccgaattatccactacacagcctaccgatccagactcctggcaggtagctatacacacacaagatctatgagcgaaatcaagctaaacaccatcgaggaagccctcgaagacttccgccgtggtgaattccttatcgtcgtcgacgatgaggaccgcgagaacgaaggcgacttcatcatcgccgctgaaaaggtcacccccgagaaggtgaacttcatgatgcgctacggccgtggtgtcctctgcgcacctatcaccgaagaccgtgcccgtgaactcgagctcgagatgcaggtacccaacaatacctccgtccacgagaccccattcaccgtcaccgtcgaccgactcggcaatggctgcaccaccggtgtatcgatgtatgaccgtgcccagacgatcctcgccttagctgaccccaatatcaccccgggcgatctggcccgtcctggtcacgtctgcccactgcgtgctcgcaacaagggggtactgcgccgcgcggggcataccgaagcggccgttgacctggcccgtctggcaggcctgcagcccgtagccgcactcatcgagatcatcaacgaggatggtacgatggctcgccttccccagctgtgggaggtcgctcagcgcttcggcctgaagatcatcaccatcaaggatctcatcgcctaccgcctccgcacggagagcatcgtagagcgtggtgaagaggtcgctatgcccacgcagtggggcgacttccgcctcatccccttcaagcagaagagtaatggcctcgagcacatcgcgctgatcaagggtgatgtcgctgacggccagcccgtcctcgtacgcgtacactccagctgtgccacgggcgacatcttcggctctatgcgctgcgagtgtggcgagcagctacacaaggctatggagctcatcgagaaggaaggtcgcggtgtcgtcgtctacctcaatcaggaaggtcgtggcatcggtcttatggagaagatccgcgcctacaagctccaggaagagggcttagacaccgtcgaagcgaacctccacctcggtcaccaggctgacgaacgtgactacggcgtcggcgctcagatcctccagcagctcggcatccagcagatgcgcctgctctccaacaaccccatcaagcgcgtcggcctcgaaggctacggcctcgaagtcgtcgagacgcttcctctggagatccagcccaatgagcataacgccttctacatgcagacgaagaaggatcgcatgggccacgtcctcccccacctcaagtaatcacccacttcatccatatagcttatggcaatattcgtcaacgaagtctcccgcactttcggggagtacctccttatcccagggctcacgacacgtcagtgcaccccacagaacgtctcgctgaccacaccgctggtccgcttcgctcgtggccaggagccccgcatcagcctcaatatccccttcgtctcggcgatcatgcagtcggtctccaacgatacgctggccatcgagctggctcgcaatggcgggctctccttcatctacggctcacagcccatcactgagcaggctgagatggtgcgccgcgtgaagaagttcaaggcaggcttcgtatcgagcgactccaacattcgccccgacgcgacgctgcgtgatgtccttgctctgcgtgcccgaatgggtcactcgacgatcggcgtcaccgaagacggctcgcccaacggccgtctgctcggtatcgtcaccagccgtgactaccgcatcggcaccacgcccgaggatgctctcgtcaaggacttcatgacccccttctccaagctcaaggtcggtcgcctcggcatctccctcaaggaagccaacaacatcatctgggagcacaagctcaacaccctgcccatcatcgatgagaacgacaacctcgtctacctcgtcttccgcaaggactacgatgcacacagagacaaccccatcgagctctctaataaggctacgaaggagctcctcgtaggcgctggtatcaacacccgcgactacgctgagcgtgtccccgccctcatcgaagctggcgcagacgtcctctgtatcgactcctccgacggctactctgagtggcagtacgacaccctccgctggatccgcgagaagtacggagacaaggtcctcgtcggcgctggcaacgtcgtcgacgaagagggcttccgctacctcgccgaggctggtgcagacttcatcaaggtcggtatcggcggtggctccatctgtatcactcgtgagcagaagggtatcggtcgcggtcaggctacggcgatcattgatgtagctcaggctcgtgacaagtacttcgaggagacgggtatctatgtccccatctgtagcgacggcggtctggtacacgactaccacatgacgctggctatcgctatgggtgccgacttcctcatgatgggtcgctacttcgctcgcttcgacgagtcgcccacacgcaagctcaagatcggcaacaacatcgtcaaagaatactggggcgaaggctcgaaccgcgctcagaactggcagcgatacgacagcggtggcagcgaagctctgaagttcgaagaaggtgtcgacagctacgtcccctacgctggtaagctcaaggacaacctcgcacagaccctcggtaagatgaaggccacgatgtgcagctgcggtgctatcaccctgcccgagcttcagcagaaggctaagatcaccctcgtctccagcacctccatcgtcgaagggggcgcgcatgatgtgatcctcaaggatcgcggatgatcaccctactcggacctaccgcatcgggcaagactgccctggccgtccgtctggcgcatagacttggctcagagatcctcagtgcggactcgcgccaagtctatcgcggcatggacgtcggcaccggcaaggatctctccgagtacacctatgaggggacgaccatcccctaccacctcatcgacatcgtccctgcggggacgaagtacaacctcttcgcatggcagcacgccttccacaaggcgtatgctgccatccgcgatcgaggcatccagcaccccatcctctgtggtggcacagggctctatgccgaagccgtcctccgaggctatcatctacccgacgtagcacccaatccagcgctacgagagagcctccaagggctttcgctcgcctctctccgtgagcgtcttgcctcctacggccccctgcacaatgatacggacctcgactcaccccagcgcgctatccgtgctatcgagatcgcggactatatccagcgggagcgcctcgcaggagctgaccacaccgagtacgagctcatagagagcctcatcctctgcatcacccttccccgtgaggagcgcagggcacgcatcaccgcccgcctccgtcagcgcctcgacgaaggcgatctcatcggggaggtccagcgcctcatcgactcgggcatcgcacccgaagacctcatctactacgggctggagtataagttcgtcacgcagcacctcctcggagagctgacccgcgacgagctcttcaccgccttagagacggccatccatcagttcgccaagcgacagatgacgtggttcagaggtatggagcgccgaggcttcacccttcactatatcgacggactactgccccgtgaggagcagctcagccaggccttagagtacctcgaggcgtgggagcagaagtagcccgtcccattctccctatcgcattatgatccagtataaagaccttaccgctggccccaacttcttcctcatggctgggccatgcgctatcgaagacgaggacacgcctctcttcatcgctgagcgcatcgtcgagatgaccacccgcctcgggatcccctatatcttcaagggctcctaccgcaaggccaaccgctcgcgtatcgacagcttcacgggcatcggcgacgagaaggcactgcgcatcctacgccgtgtacgggagaccttcgacatccccgtcgtcaccgacatccacgagacgcaggaggctgcactcgctgccgagtacgtagacgtactgcagatccccgccttcctctgccgtcagaccgatctcatcgctgcagcagcacgcacgggcaagatcgtgaacatcaagaaggggcagttcctctccgcctcgggtatggagcacgccgcacgcaaggtcaccgagtgtggcaacgaccaggtcatcctcaccgagcgtggcaatagcttcggatactccgacctcgtcgtggacttcacgaacatccccgccatgcgctccacgggcttccctaccgtgatggacgtcacccactcactccagcgccccaaccaagccagcggtgtcaccggtggcaagcctgcgctcatcgagaccatcgctaaggccgccgtcgccgtcggtgctgatggcctcttcttcgagacgcatcccgatcccgcctccgccaagagcgacggggctaacatgctccctctcgacctcttcgaaggcctactggagcgccttgtccgtctacgtgccgccctatgaagcagctccgcgccctcctcttcaccgcgctactcctcgtctcctcgctcgcactgagtgcccagacgacgaagtatgccaccatcatcaaggctctcgggcagaccgagctcttggacgaagaccgccgcaaccagctggccacgctcctcgcacaagactctgcgctcagcctccccatggagctcgatctcggtgctaagctcctcgccgtctcagagcatagccttcgcctgcagaccagcccggtgggtacggcagagctgcgcctccttccgctcgccagcggtcagggtccgctcacgacactcatcgagaccgtcagctctccgcaggtcgatgcccgcatctctttcctcagcgcaagtggcgaagcccttccctctacgacgctccttcgcctccccagctcggaggacttcctccgcggcctccagctccctatgagcacggctagcgatcgcctgcgtgagctgctctatccgctacactatgagctcagctgggcacagggcacttccgcccccaccctcatcgtccgccctaccctactactctcggaggaggacaagcaaagcgacgagctcaaggcccttatcgcccagctccccgcactcaccacgacctggggcggtcagtccttcgccccctttgtacgcgccacaaacccctaagcataaatgaaagtcaagcacgtcatcatcgccgcctcggcagtcatcatcgctctggtcgcagcgttctacttcgtcctgcgcaatgagcgcgcccagctccaggaggagaaggacctcttcgccagcgagcagaaggagatcatgcaggaggagctgcagaagctcgcctccgaatacgacatccagtatcagaagctctctcagggtatgggcgagcagaagatctccctggctaccgactcactcatcagccagctcctctccgagcgtgctaaggtcgagcagctgcagaaggagctcaagagcaataaagccaccagtgctaagcgcatcgggcagctcacccaagaggtagccaccctgcgcaatgtcctcaagaactacgtcatacagatcgactccctccagtcggccaacgaccgcctacgtcaggagaatagcgaggtacgcgccagctacgcccgtgcgaccaatgaggcgcagcagctctccaacgagaaggcacagctctccgaccgtgtgaagctcgctgcgaagctcgatgctacgcgcatctccatcacgcctatggacaagcgtggcaagctcagcaagaagctcgagaagacggtgaacatccagatccacttcaccgtagcgaagaacgtcaccgctgccgtcggggaaaagaccttctactgccgcatcacgcagcccaacgaggagcttctcgtcaagcctggggcaggtaccttccccttcgaaggcaagcagatcccctattcgattcgtcgcgagatcgagtacaacggcgaagacacccccgtcacgatgtattggcccgtcgaagagagcctgcagagtggcacctaccgcgtcaagctcttcgctgatggcaacctcatcggccaagcctccttcacgctgtaattcaccctacgccattcccccaataaagctcgaggggcaggagatacgcatctcctgcccctcggctttttatccctctcccagagctctatccccacaccactacgcccccataaaagagagcgatacggataggtggtatgaacctatattggtcgctgaatcgacctatattggtcaatgcacgaacctatatagctccacccagcgaccaatataggtctaccttacctttccctatgatatggtatgggaaggacacctgtgtcgctcctcttctcagggagagcagacacttttccccagcatgggaagcgaacgcgccaaaggagggaaacgaattttccatacttggaatcgtctactttcctcctttggaaaatcacgacaagagcaaggggtgagccagcgcaccattacggcggagactcgcccctattataggtaccctgtgcgcaccaatataagagggtatttcgaccaatagtggttcgtgcgcggaccagtagtggtcacgacgcgaagcagtactggttactactacgaaccactattggttcactcgcagaccagtactggttcgatttccctccctatatagcattggatttggatagcgcagacttcactcttacagagctaataaaaggcatcggccttcccccttgaggaggaaggccgatgcacgtaagatgagaaagggaagggagtgagaaccctgatgagaattgcttagaagctatgcccgttcagatagacaggcatctgatcgatcgcatgtcctggctcatagaacttcgaggtactcatccagaacttgtcattcgctacggaagtgatgcggtactcatcgttcccgttgtaatggtctaccgataccttgtagggcgagttctcagcgagcgcattgatcatacgctgcatggcatagcgatggtagcgccagttatcaccgttctgcacgaacttacggatatagatcgtgctggggtcatcgctggcaggagcaaagtcaaggtaatagctcagccaattgccccctcgacggagagaaatcttgtggtcgcccccatcagtacgcccgatataagcgatctcatccaagggactcgtatagtaggcatcattcacggcatcaccgacgatactatcttgtccagcattggggccagactgatacttgacaccgttgatacggttgatgacatcgcggacagcatcaccactccagtactcgtagaagaagacgcggatcttactcttcgtgaggtcatagtcagtcgactggatcgcgatcttctgccccgagggagagagggcatgataggtagagccctccttctcaatcttaatctggcgaagaatctccgtaccgatctgcccgaccttgccctgtgaagcatcgctatcatcgatcagatcatcagcaccgatgacctcgatcccttctgtagagaagttgatcgggatgaggcgaggcgcagcagagccgaccttgacctggagctggcggatgagtccgaagaccgacatcttgacctcctgcccaccgatggtcgtcgtggcaagagccttgccatagacggcattacggatatccttgaccttatggatataggtctcagcatcctccttgaggcggacgagcatcatcttattgcggctatacaccccagtaagctggatcgtatcctggtcagcgctcacatctccgaaggtgaactcaaagtccccctccagcccctgaaggagcgtattgcggggctctgcgtagcgacccagagcaggattgcgcgtatcgaaggtcaagcggataccagccgtattgtagatacgatagctggagtggatgacctcatcgagatcttccgaataggactctacggccccacccttgtggaacttgaaggcaatgttgataccgccgtactgatagcttccaggcaggagtaccagacgccagccgttcgcattacccgtcagtaggtcggtcagcttccccatctccttcgtcagatagagtgctggcttatcgtctccctcaggcagattgtcgtacatcttacaagaggagaagagtgccatggctccgagagcccaagcaaaataacgtctcatagcagtctaatctttagggatggtagaataataagagggaggaagcatagagaagtcatccttgacaaacttatagtactccgcagagggcaggttagccttcttagcacatatacgacggttagcctctgcacggacgacatcgatatcgaggtggtagttagccttcagatactccttcatgatagccagcttgcgctccaggatctcacgacctgtatagcgagagtcgggcttatacttgtggtcagcctggaccataagattctcccattcctcaggcaggagcaccatgtaggtaccatagagttcggcgaaatcttcctcggggctcttgctcgcatagtccgagatgaagcctgcagtcagcgaagagataccgcggacataccagtaggagaatgcattgtcctgctgataatctgagattgtcagcttcaggaaggcctctggtacaggagtatcctggtggagggtatgagcagactcatgatagagcgtctggatatagttgtctcgagcacgctcgtagtagtaattgaagccacttaagtcatcatcgcctaaataggggatggtaagtctattgatatcatagacctggatcatcccgaagggcgcttccccgaggaggttctgcgtagggccatagccgagcgtcccgaagaggacaagctgcttgatggtatggcgctcagcgaagcccttgggagctaccttctcatagacttcgaagaaggtgtagcgcatgaggttgaggtacttcagcgcctgagcctcagaggctggcccgagcttatagaggttactcgccaggcggtcctcatagttgtagcggatatctacattgaacttcttcccgaagtagttctggacatacttctggacctcggtcatcgtcgtcgtatccagcggtgagaagatcgggcgcttgggatcgacctcgtcagaagaagacccgcaactcaccagagccgccgagagaagaagcggtgcaatgatcttattgaatagtttcatagctgtaagcattagcgtgggttctgctggatctgtccagtgatcgcctgctgaggcagagcgatagcgtggcgaagatcagagccgaggagtacaccatcagcaggtacttcgaaggtgtctgcacctgcatcgatcttcttccagcggtagatatcgatgccaaagcgcttgatatcctgccagcgaagaccttcgtggagcgtgaggatacgacggcactgcaggacgtactgcaggagagcttccgtagcggtaccctcagtgatcgtagagccatcatggagcttgaagtgcgccttcgtcagatgcttcttaggcgagcgcgtcgtcttatccgcatagggaagtgcatcgtagtaagctttgatctcagcctgcgtgaaggtacgcttggcaagtcctggacggaggtaagcctgagtccagacattgaggtcggcgagcccaccagcgagatccccaagacggatcttagcttctgcacggttgatgagagcttcgtccgtcgtcagctgtacctcgacgctacgagagcctgtgagggtaggcagcttgggctgatagatcttgtcgatgaagaccttgtcgtagatatagggagcgaagttgtactcgtcacggttacgacctacgttccagatattcttccagagggtctcgtcagcagcacacttattcgagtgcgtatagcgagagttcgtgaaggcctcaccactggtagtagtgaactggaagtcgctgtagagcgagaccaccaggaggttcgcagcattggtaggacgatagtaagccagcgccttagcattggcattagcagcgtcgatacccgtgtagttaccagcccagttacgcagctgtgatgccgggttgtctccgaggagcttatccgcatactccttagccttgtcaggctggttgtagtagaggtagaagcgcgcagcaaaggcataggcagactcagcggtgaagtggaagcgacggatatcattctggtagatgttgtacttctccagaagagggatagcttcctgcagatccttatcgatcttctcgtaggtctccttgagggtaccacggggatagtcgggcaggatcgtcgtgacacgctcagcgatataggggataccgaggttcgtcgcaccaccctgaccatcgaagttgtaggggaggcagaagacgttcgccagctggaagtgcgaccaagcgcgcacggcgagggcttcagctcgtgaggccatgttacggtcaccgtagtccttggtttcttcgatgagcgtcagcacttcattagcctgagcgatagcgtagtagtaggactcccacagcttgagcgtcccatcgtagtaggcggaaccatccgtcgtcgtgatcggtctccagtagacagcgaggtcctggaagtcctcacggtaggggttacgcgtctcatcctcatacgtattgtccgaggagagctccgagatatgagccaatgacgacagcggataggcgtaggtcaagaagcggctaatcttataaggggtattcccatcgacatagtgcccatcggcattctcgtcgaggtacttcccacaagagctcatcccgaagatagagccagcgaccaaagccagcccaagtaggctgaatgataacttcttcattctgtatagatcctttataccatcagactaaagcccgacagtagcggtgaagatgtaggagtgagggtcatagctatagggcagcgcaccattgagcttcttatcagcatagatgagtgccacattggaggcctgaagcttgagggcaagcgatgacagacgcaggcggtctacgaaggccttaggtaccgtatagctcagagagatatcacgcagctggatgtagtcggtcttagcgacgcggacatcagacttgttgtagttcgtgtaggcattgctcaggtaggggttagcctgacggtgagcatccgtagcgatcacagggacgttcgtgcgctcttcgtcaccagcacgcagccagcggcggttgaactccttacccatgatctggtagtcattgtacttcgtagcgaactgctggggcaggcgcatcacgccaccgaaggagtagtagacgtagacaccgaggcggaagttcttgaagctaaagctattgttgataccaccctggtcggtaggtgtcagagtacccgagtagaggagatagtcaatttcctcgggattagaagccgtccaagctacctgaccacccgtcttaggactggtgatgtggcggccatcaggcaggacatcagcaccgttagggaggaagaagcgaggatgcccattctcatccagcttatagaaggggatggagaagagtgagttcagagggtagccctgacgagcagcaccgtccgtgaggttcgtcactgaggggctggtattcaggcgcgtcaccttattggtattgcgcgagtaggtgatcgaggtagaccaagagaagtcgcgggtttggatattcttcgtagtcagcgagagctcgatccccttggcactcatctgagcgacattcccatagagatagtcgacgaagccaccagtaccctgagggaatacctggtcgatgaggtcacgaccctgacgattgaagagggtgatacctgccgagatacgctcatcgaagagaccgaagttgaggccccagttgagctcatacatcttctcataggtcaggtcgtagttagcaggctcattgatatagacccctggctcgatgaggttagcatccccgaagaagggaagcagcgtcttcagacgaggcagtgcattgtgcacataagggatcgtacccgacatcccgtaggagaggctcatcgagagcgaagacaggggcttgagcttggggaagaaggcttcctgatcgatagaccagttaccaccgacgttccaagtggggatgtagcggatggtgcgagcacgaccgaactggttcgtcccttcacggcggtaagaagcattcacacggtagcgaccgaggagggtatagtcgacattaccgacgagagagaccccgcggtccagcgtgggatggatgctatagtactgcttgctcttattacgcaggttcgtgaagagcagaggcgagtaggtagtcagatagccgaggttatagttgaccccataggcatcgaaccactcattgaggtgacgctcttcgaagacttcgagaccagcgacagccgagaggctgtgctcgccgttgctaccaaaagtgtcattgtagtgcgccttgatctggccatcgtagcgctcatcgatgatattctgcgaattgcgaataccaccatagggcatcacgatctgaggcagagccgtggggtcatcgagaggcttgtagaggtagtcgctatagctacggatgatactcttgctgatattgcggtacacctctgcagcattggagtgctcatcgcggtcggtcacaccatactggtcacgatagcggagtgcgccgagggcagagagacgaagctgcgtgatgggctgccagttgatggtagcctgcagagagaggttagccgtcttatagtcacgagtattgtgctggagctcgtgcttgatattgaacggcgtgtagtcatacgcatagaaggcattaggatccagcgtacggctggcggtaggagcatagctaccggggcgccagtcaccaccatagtgcaccttgccgtaggaggccgtagagcggataccaaagctccagcccttgaaggggcggaagtcagcgttgaagttgaacgagtaggtctgagagttctcgtacttattccaccctgggtcaaggttagcgttgagcgaagcatagtagttcgccttctgcgtacccgtagagaaagtcagggtatgctgatggcggatgctgtgctggaagagttccttgaaccagttcgtattacgaagctcagcagcacggaggtaagcagcacgacctgcatcggtattgagtacaccgtactcgccagtcaggtcattgtaattatagatgctattgtagaggtagccatagaccccatagcgcgaggcgatgaagacagcctcgttgtcaaggctcttaccattagccatctcattgaagacggccatctggtcctgagagttcaggatattgaactcacggtaggaggggatggcacgataggtaagctcggcctgataagtgaaggagttcgtcccctgcccagccttactcgtgcggacggagataacccccccgagggcgcgctgaccatagagggcggtagcagaagcatcgttgatgacctggaagctctggatgtcgctctccgagagaccgggcagagcggctgcgatgaggcgcttagcttcgggagaagcaaggtcggcgacgttgaagtccttgtcttccttgtagatcactccatcgatgacccacaggggatagtagacgcttttcaccgatgtagcctgacgcatagagacgaccgtagtggtctccttcttttcaggggctgcattggggagagtaacttgcatgggcgtggtcgtagctaccagctctacagtttgcttccctgtcagagtaaagacaaggatcgtcttctcggctacttgaattgagaaggtaccgtcagatgccgtggtggtatgcagtgccttgtcctgcttagcggatacagagacgccagcgagggccttaccttcgctgtcgatgactttacctttagcttggatggtctgcgcacacacgggcatcgcacccatgatcacgaggatcagggcgacgaatagactacgtaatcgagttagcataatcaaagttgatgcattgttgtgttagtgcgaattgcggtagcaaatatagataaaaagctatataaagaaccttcggaaataggtcttacttcctaatatttttaatgaacaaaacattccacctactcagccacttccatcacgtcattctgccacattttgccataattcggccagcgaagaggcacaaacttcgtcaaaaagtgatggcatactgatcggaaatttcttcactttttacgcaattttcccgtctcatacgcctccaagagagcacgaaagagcgcaagctatcccccacccctatatatcaatgtatgaaatacatcgggagatcaatagacacatcaataagaggatactaagcgaagctatagtgcgaccaagagaaagcaatacggcttcggcatacaaaccaatagtggtcggcgggtaaccaatagagactgttgccgcgagtccagtcctctatttcgtatgctaaggcatcgcacgtccagagcccaccgatatatctctccgaagtgaccgagcaaacccttcgtcttatcacgaatattcctcttatccagcggagggaaaagtgtccttctcgtgaagaaaaaagcgccttcccgtagtggttttcctctgtctacgcacgtagtcttaaagaccaggcacgaaaaccctaaagtctacgtacgtagatattagagccacgtacgtagtccaaacttatctaccactcgtccacaacttttatccctacgcggagcaataacctaaatattggtcacttcacaaagctatagtggtcggagtagcgaccaatacgagttccccccctaccctccgcgcggctccactctactgcataaagaagcccctcccaccgaagggctgatcgctcaggatcagcgccttcagtgggaggggcaggcggagtacctcgaagtagcgagagcgaaagatcttcgctacctcaaaggtgaaagtgcgggggaagttacttcttcttaatcgtcttcatcatctcctgtacggcacgctcgagctggacgtcacgaccagagaggtagtcggcaggcgtgttgtagacctcgatgtctggctgtagcgtctggttctccatagcgacaccattgacatcggcgcaggtaacttcagggataccgaagacgatgtaaggattgatctgcgtctcccaccagacagccgtcatcgtacctgcgacaggcgtaccgatgaccttaccgagaccgagggtcttatacacccaggggaagccatgaccattactatagttcccttcgctcaccaggacgcagctgggcttagtccactgcatgatggggtcatcaccgatgtactgaccacgaggcgtgaagcgagagtagagcttaccgctgagcaggaagacgaggtcttcgtggagccaaccaccaccattgtagcgggtgtcgacgatgactgcatcatagttgcggtacttaccgaggagctccttgtaagcattgcggtagctgtacgtattcatcgagggcacgatgatgtaggcgatacggccaccactgagcttctcgaccatatccttacgctgctgtacccagcggcggtggaagagatccttctgcgtagactgaccgatggggcggatgaactcctcgaagcgcttacccgtcttaggatcgtggaaggtgacgctgacgcgcttaccgaccttaccattgaggtagagctctacgggacgatcagcatcgatgacttcgccatcgatcttctcgatgatcataccggccttgatcttgtcaccgaagtgcgtgagcggaccaccagcgaggatctcctcgatcttgaggccattgcccgtgtgcttctgatcgtagaaggcgccaaggtaacccgtctgcttagcccaacgcttggggaagacacgaccacccgtgtgcgaagcattcagctcgccgaggatttcactgaggagctcagcaaagtcttcatcattatcaatgtgggggaggaacttgcggtaggtcttgcggtagtagtcccagtcgacaccatggaggttgacgtcatagaacttctccttgacctgctgccatgcgtggtcgaagatatactcacgctcagctgcgggacgatgctcaaactcagcagcgaagctgatagccttgagttgaccaccatcgagcttattcagcccagaggacgtgccgacatagacggtcttcccgtcctgaccgagcgtcaggctaccaccaccgacacgtgcgctgaggagcttcgtagactgctcttcgagatcacgctcccagaggtcgtaggagttctcatacttagcgatgtagtagagcttcttaccatcatcggtgatgacggcgtcagagagtgagcctgaggcgcgcgtcagacggaccgtgcgatgatccaggtcggtgaagtcaggcgtgaagcccttgctttccttcgtatcctttgcatcctttgcatcagccttagccgacttcttcgtggacttcttagcaggcttcttggtatccttcttctcgtcggtcttcttgtccttagtcgtaaggtcagcgagttccttctggagctccttatcttcctttgagagcttgaagtcttcgtaagcctggcgatcgaggaacatcaggtagtagtcacgctctgcaccccagctaccatgactacggtagcccgcgcggtcagaggagaagaggacggccttgcctttcatgacgaacttacccgagccttcggagtagccgctctcggtgaggttcacgatctcgccagagccatcagccttgaccatagcgcagtcagggtgctgccagccgccatgaccgatatagtcagcgaggatccacttgccgtcggggctccagcggtagctgatatcgccgtcggagtaggagtagttgaacttcttgtcgaggaccttgtagtcacggccagacttgaggtcgtggacgtaaatgcccgtgcggtcacgcaggtaagccaccttcgtgccgtcgggagagaagagaggctggaaggatgcttccttattcttcgtcagctgcgtctccttgatgtcacgcgaatagacaaagagggggtcatccgagcgattcagctcagccatatagatattccacccgccattacgctcagcagcgtagacgatcttcttgccatcgtggctgaagtcgacatcacgctcttcttcgggggtgctggtgaggcgcttcgtcgtgccgtattcggtgtgggtgacgaagacatcaccgtggacgatgaaggcaatttccttattgctgggagcgacggcaaaggacgacacgccatcacggatcgtctcaggattgatagccgattcctcctggtcacggacgatggagacattcaccttcgtgggctgaccaccaggcgtctgagtgtagatctcgccatcgaagccatagcagagcgtgccattagaggcaatagagaggaagcgaacggggtccttcgtgaaagaagtgatcttcttgtcggcagcggcagccgtagcagcatcacggtggtagacattgaaggagccttcgcgctcactgaggtagtagaagccgcccttgctatcccagacagcattacggtcttccccaccgaaggtcgtgagcttcgtgtgcttgccatccttggagcggagccagatatcacgtgtcacaggcgagatagcgtgcttacgccagatatcttcatagcccttgacgtcggtgtagaggatctcgccatcacgcagcgaaggcatcagcataggataggcgccgtagagcttggggcgagcaatagtcttagagaggtcaagtgagtaggtctgtacgaaccagtcccagggatacataccatccttcacatcaggcatgacgtaggactggaagaggagcgtagagccatcgaggaaggccacgggcacctccttctcgctgctataggtcaggcgacgtagacctgagccgtcagccttgacgatatagacgtccttgctcccctctcgatcggaggagaaggccagcgaacggctgtcggggctccaaataggggtgccgtcgtaggcggcattagaggtaaggcgtagtgcctgcccaccagccgtcggtacggtgtagatatcccccttgtagcagaaggcgatctgcgagccgtcgggactgatctgctgatggcgcagccaaaggggagatcctttctctgcataagccatagcaggtaaagccaaagccgatgcaagagctaaagtgagtattcgtttcatagtcgatacggatgtgtatagtgtggtatgtgcgtgcggatgacctgcatgcggaggcttaagacccacagctccctaagcgatgaaagtgcccttgcagacgaaagcttcctgcaagctgaagtctcaagtaagaggcgctccgaaatcgagtacctcctctatgagatatccccgtgaggaagccacctctactcgggagaaaagtgtgcgggagtgagtggaacaaaaaagaagagagcccccgagacacacggaggtgcgctggagggctctcttctgagggaataatatcggagagagaagcgtgacttagttgttacgcttacgagccgagtagcttaggttaagtgcgtcggcgcgtcggagctcttccttgatctgagagatgatgttcatcttcgtatccttatcggccttcagagagacctgcataaggttgcgacgctcgtccttgatctttgactgtgactgcttgaggtagctgtacacagccgtaggattctgcgtgacctggtcgttgagctgaatcgctgagttagacccgtacatctcgcggtattccttgttgggcttaccgacgtagatgaaggtaacgagcgacttttcttcgagcttcgtaagctcagtagccgtaggcaggttactgaagctcaccttcggggtaacctcacggatggtcgtaaccatcatgatgaagaagaggaaggcgaataccaagtcagggagggacgaagtgtttagctcgggcatctcacgcccacctgatttactgaatttacccatgtcttttacttctttgcaaggttagagagagccatttcagagatatgcataggatatgcatcctggacagacttcttctcggaaggggaaagcgcctcaaacgtcttgcctccgaactccttcttagcgaaggcatcccagacctcattgtaggccttgatgagttcgttctggacattgacgtactgctggtagctggtctcgacctcattcttgatcgagatagcataaccagaggtgatgacggtacgctcacccagcccttcgatctcacgacgctcaagctcagggaggaagggcttgttctcggggttcgtaatgaactcgacagcgtagtccttcaactcatccagcttgacggggatgagctggtcgacgccagacgcatccttacgcgagatcacgatctcgtcagcgcggttgaccaagagtcgcatgatgttgcggtcattgatctcgatctcctgctgcttctgttgctttggagccatcggaggcagacgcctcttcagacccttatcagtatccattgaagttgtaatcaagaagaagataagcaacataaaagcgatatcggccgaggacgatccgttgatgccaggagtctttcttttcagagccataatgctttttgttctattcgttactgattacaaccgttacttcccgaggaatctcttggatacaccgccccagacgacggcaccgagggtgacgacgaagaggacgtaggtggagtagagccacatatccgtgaccttcagccaaccactggtattataagcctgcgaagcttcgttaagacccttgatagcctcaccgctaccgatagcatagccgaggatgagtgagacgacgaggacgacgacggagataaggttggacttacgtgccacaacgtccttggtcttgttggtagcgatgctacgtccagcgaagaagagcgtcgcaaggaccgtgacgatgaagaggaagtacgtccagtaaagtaagatacccgtaaacgcatagtccttattgcccttagcgtcgagctccgagcctcccgcgaagaagaggacgaagatcagtacgctgagcgccaggaggactaataaagtcgtgctggataccttgcgtatcttagttacagccatttctttattgttgttacagggtaggattacttgttcttcttggcatcgtacttgacgatcaggtcaagcagcgtgatggaagcgtcttccatacggttgaggatgccttcgacgagagagaggatgtagttgtagaagatctgaaggatcagagctacgataagaccaccgatggtcgtgataagagcgaccttcataccaccagcgacgaccgttgggctgatatcaccgaccttttcgatgttatcaaaggcctggaccatacctacgaccgtaccaaggaacccgagtgaaggagccatagcgatgaagagcgtgatccaagagaggttcttttcgagcagaccaccctgtacaccaccgtaagatacgacagacttttcagcgatgtcgataccctggtcagcacgcaggagagcctggtaagcgatagaagcgataggaccgcgcgtgttgcgagctacttccttagccttttcgatgttaccttcttcgacgagagccttttcgatgtcgcgcaggagcttgtcggggttgacgttagccaggttgaggtagatgatacgctcaaggcagatagccagaccgaggatgagggcgatggcaacggtagccataaagtctgcacccccttcgatgaacttggtcttgagctcctggtggaagcccgtttcaggtacagcttcttcaccagcgacctggtcagcagcaggagcttcagctacagttgcggcagagtcagcagcgggagcagcagaatcaacctgagtcgtagcagcggcagcagcgctatctgcattctgagccgtagctacattagccatacctacagagaggagacccacgcaagcagcgattgcgaataactttttcatgtcgagttgtttttgtgagttagttagttctatttattcgtttcttcttgttcctataacgtattgaaagcactacaagcagatggaggagtactgcattcccgccataaggcagggcgagtgtagagcctttcggcatcaaaaatacagcttttccaaccgaaaaacaaaatcattgttcaccgaacttcagttgagccgtcttcccgctccacaagagggcgtccgatgcttcgtctaacacaatagtatatagagactgttgtctataatcctaccctctatttagagtaccaaggcatcgtgcgaccaattccccgatatgcctctctgaagtggtcaagcaagccctccgccttatcgcgagtattcctcttatccagcggaaggaaaagtatcgttctcgtagagggaaaagcgccttcccgtagtggttttcctctatctatgtacgtagtcttaaagaccaggtacgtcagtccaaatatccacgtacgtagatattagagctacgtacgtagtccaaacttatctgacactcgtccacaacttttatccctacgcggagcaacatcctaatataggtcacttcacaaagctatacaggaatcaggccaaagctatatagctttcttcgccatcctatataagctctgcccacgcactcatatagggaatataagcacctctgccgtccagcacgcgaagtgcagtggacggcagaggcgaggagatgagttagaacttcaccgacaggtcgacaccgagggtacggggtgccgaagtctggaaaagacggcccagcggtgaggctgcttggaagaccgtgtagctattatccgtaaggttggctccccacagtgcgagcgtgtagcggtcgtagctcagcccgaggcgagcacgtagcgtagactggagggactcgcgggtcgtattgtcttcacgccaatagatctctccgaggccagcgtactcgacctcacccaagaggcgcaggtggcgtgagagcggctcgttcgccgagagcatcacgctataagtgtggcgcgggatgaaggggacgaagttacccttcttcgctgctgtcgtctcctccgtgaagcgggcatcggtgaggctatagttcaggtgtgcgcggagcgaagaccataggcgctgcgtggcggagagctcgaagcccagcgtacgggacgaacctgcattaccgaccatacgacctgcccccgaggcgacgaagcgtgtcagctggaggtcacgcacctgcatcagatagacagaagaggagagctccagccctgctgaggggagggcatagcgtgctccgagctcatagctccagctgtgctcaggcttgtaagtcgtcgccgaagcgatcgtcgagctatcgaagcccccacgccctgagatctgcgcctgaagagccttctgctgagctgtggtaatgaggtcggagaaggactgctcattgaagccccccgtcttcaccccacgactgacggtagcgtaggcacggagtgcttcggtgggatgccacgttacggagagcttgggcaggagattccagtagcctaccgactgcttcccctcgaggtgaacgggaggcgcggtagccagagcctgagtcgtccctgccacagcgagactcagctcatagccacgggagtcgtagctgatctcgtggtgctcgtagtcaagtcgcagcccaccggtgatcgtccaggcgggagtgagatgataggcactctcatgatagagtgccagcccccagtcgggcatacggaagtcgtttgcattcgttcgatccgagcgcgtagcatcgtagtagacgagcgaaggcatggcggggacgcgctgcttcagggcagccatcgcttgattgataagcgcactcagcccaccataggagaaggtcacgggggcctctacacgcttggcatcgtggtagccgaagagcccgacactccagtcgtagcggctgggacgctcgccacggagattcttgaggatgaactcctgcgtcagcccatgctcacgcagcccctgtgtgacgtggaagtacgagagagggagggcatccatatccatctgcgtctcatcgaagaggtactgatagctcgtcgccgactggagctgtaccccaccccacttatagctgaggagatagcgcagcgtagccgtgtggcgcttgtagctctcgggtgcatcggccgagagcggaagtggctgcttggtacgagggtcgtccgtgcggtagggaaaacctccctgctggacgtagtcgcccgagagggagagcgccatctcaagctgctccgtagggcgatactcgagcttagcgaagccacctatcatacgcagactatcttgataggcctgacgggtctcattgtagaagtagccacggcgggtcgtccccgagaggccgtagctcagccccaccttatcggagaggcggaaggcctgctcgacggagccacgcaggaggcggtgcgagcctgctgtaagctttgcttcacctccgggctggtcgaaggctgagcgcgtgtagtagttgatgatacccgacatcgcattgcgcccgtagagcgtaccctgcgggccacgtagcacctcgacgcccgtgataccagggatatcgaagttgaagcccgacttattcagcacgggcaccccgtcgacgtagagcccgatggtctgccccgagctacgtgcaccactcccacgcagatagatggcggcactgcgcttagagccgtagtcgggcacgaagaggctaggcacgcgccccgtaaggtccgtgatgctctgcatacgatactgactgaggtcacggcttgtgatccacgtcagcgctgctggctgacctatggaaggagcggtagggcgctgggggacgtaggagcggatgacgacctgctcgataggattggtctggatgctatcctgctcctctgcatggagactcatgggcatagccataaagccgagcgcaaagagcggaaatacaagtagctgtttcttattcttggtaagcattggggattatgaagctaagggcgatgcgctgactcgggcaaaggcactccgtcagcacgccgtcttggataaatcaccacaaaggtagagcccgcgcctgctgcagcgaataaaatcaccaaattcaccccgaattcagctaaaaaaagaccagacccgccctatcctcccctccgatagtacacatctatcctcccgctcctcagagtaggattcacggggacggagcgaagggattatctttgcgctgtgaagaagcccttcacttagccccatcattatggccaaatactcccatctcttacctctcctcctcacgctcctctttgcgtccgatctcggagcacagacctactaccgcagtgaagagcctcactgtaccgccccgaaggatagcacgacgctcctcggtctggacgtcgtcggcgaaggcttcttccgcaatgacgaatatgcctccgacctcgtcgccgactataccctcccaggctatcgcctgcgagccaacctcagctaccgccccgagacccaccttcccatcgagctacgtctcggtgtgtaccacctctactactggggtgccacacgctacccggccgccttggcctatcaggacctcccctactggcggggcgatggtgaccgctatacacgcctgcgcctcctcccctacttccaggcgtcgatacagccagcagcaggctgggctatcctcctggggcatctgcaaggcggagcgaagcaccgactcatcgagccgctctacaatcctgagctcaacctcaccgcagaccccgagatgggcctgcagattcgctacgaaggacagcgtacccgactggacacctgggtcgactggcagagcttcatcttccgaggcgacaagcatcaggaggccttcgtcttcgggctcagcaccgcccaagcctttgacttcaacacctccgaccgcctcgagctccagctccaagccgtcgcccaccatcgtggtggcgtgctgaatgagcgagccgacaccgtgcacacctggctcaatgccgccctcggtgccgtgtacagccatcagtttgcccgccccaagcaccccctgatggtacaggcaggactctacggccttgcctatagccagcggggcgagcactatgcctcggacaagggctggggcttcctcgctacagcgggcctgagctggcgacgctggcagacggagctaagtcacttctacgggcacgacttcatcagcccgctgggcatccccttcgcgcagagcgtcgggcgtgcgggacgaagccacctcctcacacatcacccacgctacaccgcttggcaggggagctaccgcatcatcgagtccgaggcgtacaccttcggcgtgagtggtgggctctatatccacccacattcagcgcatagtaccagctccttcatcgaagcctacctgagtatctccccacgcttcaccctcctccgtaggcgagggcagtagcccgccctctaccctattacgcaccgaggcccaccccgcatcagcagggtgggcctcgtcgttatcgtaagaggaaatagccgactacagctgcacgcccttagcgcgagcttcgtagcgacgccctacgacctcccagtcgatgatctgccagatggcacgcaggtggtcggcacggcgattctcatagtcgagatagtaggcgtgctcccagatatcgatagcgaggaggggcacacggccacgagtgacgggcgtaccggcgttcgaggtcttctcaacgtagatatcgccagcctcatcggtagagagccagagccagcccgagccgaagatctcaccaccagccttctcaaagtccgccttgaaggtatcaaagtccttgtagctacgcagtagagctgcacgcagagccccctggggctccgtgacgcgacctgcttcgtaggggcggaactgcttgaagtagaggaggtgattcagcagctgccctgcattatcaaagatcgctcccgaggagaagcgtaccagacgcaccagatcccgctccttgatatcattctcacgcacgagcttattgagcttgtccagatagcccacgacgtgcttgccgtagtgaagcttgacggtgcgctggctgatgacaggcgcaagcgcatcggtagcatacggcagggcaaagagctggaagggaggcttagcaggctctgccgtagctgcaggtgctgtagctgtagccttcgtcgtcttcgtttgggctgagagtgagctgatagcgagggctcccgtgaggagcagtgcaagggatctgattcgcataatgaaggtggtagggtaaataggtgatagtcgcttagtcgtcgtagccgacgatctggtagcgcgagtcgaactggacctcaaggccagagctaagctctaccttgtagccacggcgcttgcgctcgatctgtacgatggactcgccagcatgctgagcacgcagggcattgatgatctgagcggggatgaatgacgtaggcagggcggtacgcttgccgtcgacctccttccactcaccacgagaggagaactcgatctcggtgccatcggcaaggagtacatcgtaggtcgtccctgagaagtcacgatcttccttcgccagggacacagtgcgtccggcgaagtgcttcgcgaggaagagctgggcggccttaggcagttgcttggtctggatgacgcggtcgctacctgcacgcagactgagggtcgtgagtacgaggagagcgagggtcaaggacagaaatctcttcataatctgaattacttagtttggggggtgaataatgtggtgtattaccatcgctataacgtgaggtggagagaaaaggtttttcctccaaaaaaccacccgaaataaccacctatcaaacaagaatatagcgggagtaaaaagcaaccagtactggtcagcgatcggaccagtactgattgaccagagtgaccagtactggttcgcagtcggagcagtactggtcacgcgggtgaccagtactggttgatttgggggatcacaaagcaatacgggcggggcgaccacagaggtcaccccgcccgtagcggatagttaggtcttcagcgagcccttagtgcttgtcgccctgataggtgagcgaatagggatgcaggacgcgagcactccacttagcagcttgcgaagcagagctatattcctcattgccgtagaacccatagcgcccgatacagggagcagtgacatagcgcccacggctgtctggactgaagttcgagggatcaagcgaccagtaagcagcacgtaccccacgctgcgtgatgcccccttcatgcgtaccagggacgaagaaccagcgtacgaccttattcgctgtattctgatgatcatcccagaaggactgagggatgaacgtcttgatatccccgacgaagtacttcccgagatagactgccgtagcctcgatatagcacatataggggtctttaatattggagcctacgcccgtaaagaagacaggcgtgaagcggtagaccgcctgatgatcgctacgcacagggcggcctgcgacagcagcgagcgtgtcgtgacggaagagcagtgaggtagagacgtgcttagctccatcagaataggtgatgacgcgctcgcgacgaggttgctggagcttaccaccctcgatcggagtgaaggcacgatcagccatgacgatacggccatcggagacggctggaggggtattaccgtcatagcgccagttgcgatagaagaccgcattgctacgggtgatccctgctaacgccagcgtgttgtggtcagggatatagtagttcgtcccatcgatctgaataggagtcgtctgacgtggctgtgcgggattagagcgatccagatagcggctgagctgatcgagcgtgaagaggctgacattctcattgatctgctccttggtctctgggaggaagaagagacgaggctgggtctgctgcttgcttcctgcagcggcataggagagggggcgacgcgacatataacccagctggatattgggctgctcatagagttcgcagttcatgtggtaggccttcccactcttgaggttgaggtctgtccccatgatcggcacgatcgccatattgggcttagcgatgctctgtccaccttcgctcgcaccgacagcatagacgtgcgtcgtggcatagcgcgaggcggcctcggggtcgatagagcgagaagcttcggggaagatcacctgatagctggggcttgactcagccgtaccatcattgtagccgaagctcgtgcgagaagcagcacgtgaggtaggataccacactacgaccgcatcagaggtcgtgctacccgaagccagattagagacggggaagtcgtaagagtaggtgtggtcctcgtagttcgagctgtagccaacccaagagggaagctcattagcaccgagcttatccagtaggcctgggttgaggtcaatctttgcctcaggcaggaggacatttgagacgaccttgatacccgagaggctaagagccttcgtacgggagttgtgtacggtgtaggctaccatcgtcccaagaggacggaggtagaatcgaggattcacgagcttacttctaccccctgcaaccttcgtcttagagaggcgggtccaaggagaaccataaggtacttcaagagagaaggtccgattctgcgttgtattgaccaagccctggtcaccaccagcacgtagagacttatagcgaaggataagatctgaggcagggactctcccagcaggagttagattcagctcgaagtcatcgggtacgaggtaaagcatggcctcccactcatagcgttcgaagggaatgtgcgtaggtagattgatagactctcctcggatcgtgagagccttcttgccattgcgtttccacttcatcagggagtagatgtagggagcatggccgttgggttgattctgcccgacggtacgaaggatcacaagccccttgtactcggtcttgctttcatcaagctcaagggcaatcttcttgggaccattgtaggcaaagccgagggacttggcttctgcaccagagccaaggacagggagagcctctgcggacgcttcgatatccagctcgatggactccccagtgttggtagatgacagggtaattcgattgtcgtcctcagcgtgcgtgatggtaggtgcatctgctgtcttggagcacgaggtgccagcaagaagaaggacaaacattagacccaaaggccgaatcatacggtaataagaaccaaacatgatgagattagggatgagcgaggctgcgcagtggcgaagccccttacaatgttagtagggtgtgtggtacgaaagaggagatactgctctcagggaaaatactctatgtgcacccacgatgtatagaacgtctatactcggagtatcgtatattccttaactaaaagacgcactactgagccattaaattagtcttttatgagcaaagcgcccctacccatagggaggggagagaccaaaaacaagcgtgggcggagcgactccaagagtcactccgcccacgctatgatagaagtctttagatatgtctcacactacgaggaactacccttcagcgggcagagccgaggcaatgacctgctgtgcaaggcgagctgaggcggggatatgcgccggaggagtaccttgctcactcatgtggaatgcggggtgtaccgtcagcaccacgcgacgtggatgcggcaggtaggtaccacgcggtaggacctcaaaggccccatcaatcgtgacgggtaggatggggacatccagctcggaggctatcacgaaagctcccttcttgaagcgggtaagacgtcccgtctcggtacgacttccctcagggaagatgaatatagagttgcctgtcgccaggactttcttggcatcctcgatcgtctgcgcgatagaagagacacgcgtctcatcgacaaagatgaagtgtgcagcttcacacgccttacccacaagcgggagacggcgtagctcggacttcatcacccacttgaaggggatacctatataggcattgaggacgaatatatcgtaagcgctctgatggttggctaccactacgcagggcgcatcggatgtcggtagattctctcgcccacgcacctcgacacggcacagcgatacggccaggcacgtccatgaccagagcttagtagctcggctgatgaaagatgctggagcccctgtatagcttgcgacgatgatcgtaagacagcaaataatcgtagctaagacgaaaagcgggccacctatcaggaagaaatagatgagatagacgatgcggccgagggagagggatttcataggctcaagggaatgctgtgtgtcggtctctattcgtcgaggggcaaggcgtggagatagcgggcgaggcgctggacagcacgtccgcggtggctcatcgcattcttctcctcactactcagctcggcgaaagtctgctgacatccctcgggacggaagacagggtcatagccgaaaccatggtcaccggagcgctcgagcgtgatctcgccattgactgcgccctcgaagaagtgcgtcccgtattcgtcgatgagagcgatgacggtgcggaagcaggcacgacgtggggcaggtacccccttgagacgctccagcaggagagcaacattctcttcgaaggtagcatgctcccctgcgaagcgcgcagagtagactccaggagctgcgtcaagagcctcgacctcgagccccgtatcatcggcaaagcaatagagtccgtagcgctcccagacgtgatgcgccttgatgagggcattcccctccagggtatcggcggtctcagggatctcctcgtgacacccgatgtcagcgagactgaccacctccagacgtccagagaagagggcacggacctcctccagcttatgggcattattgctcgcaaataccagctttttcatacatttgtttcataagcacagcctcacatagagcttgagaactcaccagtcaggcttcataagtgaggcaaatttagggataataaacatatctatggacattgagcagctgcgcgactactgtctctcgctccctcacagcagtgagagtatgccctttggggacggatgtatcgtatataaagtcgtggatcgcgtcttcgctatcatggctccagacgggggcgagccacggctctcgctcaagtgcgaccccgacagagcggaggatctccgagctgcttaccctgccatcataccaggcttccacctcaacaaaaagtactggaataccctgctcctcgatcagcacctcccaccgaagctcctcagctccctcatccgccactcgtggaatgaggcctcagctaagctcaccaagcgggtacgcactgagctcggtatcactcccctacccgaagaagactaaccccacctattcacccaccctcaatattacctaagcacatggatacttcactgcttgaattcatcgaccaggtagacagcacgaatacctatctcacaggtcagatcgcctcggggcgtgacctccctcagctccacaccgtcgtatgccgccagcagacggcagggcgtggtatgcgaggcaatacctggacctcgcgcccaggagatagcttgaccttctccatcctcctgcgctccgatatgctgcagggcaagcagcagttcgccgtctcggagctggcagcctgggcagtgatgcgcaccttcgcctcctacatgaccgacgaccagaagcagcagctccgcgtcaagtggcccaacgatatcttctacggcgaccgcaagctcgctggtatcctcatcgagcacagcctcacggggacccgagtagactactcggtcatcggcatcgggatgaatatcaatgacgaagccttcccacccgagctcccctcagctatctccctacgtatgatcacgggcagaagcctcgagccgatggaagtcctcatccgtctgcatagcgagctctcacagctgctccccgacttcctcctcggtcgctaccaagatgtgcaccgccactatatgaagtatctgtatcgcagagacggcttcttcctattcaccgatatccaggggcagttccgcgcacagatcaaggacgtcactcccgaaggccgcctcgtcctacagcgtgaggatggctgggagcgtgcctatgccttcaaggaagtccgcttcgatgctgagtaaggcagagatcaaggacatccgcagcctccacgatgccaagggtcgctcatcgcagcagcgcttcatcgccgagggaattaagctcacaggggagatgctcggcgccttcccctgtgagcttcttcttgctgatgaagagacggcacgtgacatcggccgacagctcgacaagctaccgcaagccctccgccccaagcgcatcgaggtcgtgcccgagagcttcgactgggggcgtgtgagttcgcagcgccagcctcagccccttcttggggtcttcgcccttccccaagaggacgagggaagtcccattgcctcgggtgtcagtctgctccttgatcgcatccaagatccagggaacctcggtacgatcatccgaacggcggactggttcggcatcgagcacctctacctcgctccaggcaccgccgatcccttcgcgccgaaggtcgtacaggccacgatgggtgcactcacccgcgtcaagatccatcgcctaagcgatacactcaccttcctcaagggcttctcggggccacgcctcggcaccttcctcgggggcgaagacctctacacgacggagcttccctcggggaaggacaagcccgtgctactcattatgggcaacgaaggtcaaggcatccaccccgatctggagccgcacatcgatcgccgcatcacgatcccgccctatccagcggagaactcccataccgaatccctcaatgtagccatcgccacggcgctcctcctcggtgagctccgccgccgtctctaaggctgcagccaccacctcatcagcttgccccccactgcatctacacaggatgtagtggggggcaaatttattcgtatgtggggtataaagagcatcttcccgcagtggtattcttctatctatgcacgtagtcttaaagaccaggcacgtaaatccaaagatccacgcacgtagatattagagccacgtatgtagcccaaacttttctgccactcgtccacaacttttatccctgcgcgaagcaacaacctaatagaggtcacttcacaaagctatataggaatcagtccaaagctatatagctttcgccgccctcctatatagctctatccacacccagatatacctacatataataaggtagtacttcgccctaagacgtgtatggtgcagacaaagaaggagccctttacaaagggacgcccaatgtaaagagctgtaaggtgctatttcatctaataagctctccctcatcccattcttcaccccaacattcaccataaatgggtaggctcccgaagaaaactacctactaacgaggattgcgggtaggtgagattcagcatttctttgtgtcaaccatttatagcgcaggatatctgcatgaagtataaacaattgcaaacaaatatgagcgtacgccacctccccctgatgctatcgctcttactcttgctctgcagctgtcatgagtcaggtcatgacccgggcaaggagctctatgagcaacaactgcagcagaaaggtctgcttgctcatcggatagacagcctcttcaccagcgcattcaccgatcctctcggtgtggagcggggattggaagagctctacctccacagaggagtctcagctggcaccttgagcagcgatccattcttctacagccaggtcacctacgttcgcaaggctctcagcttcagcttgcgtgcgcactctctgcagaccctcttggcaagtgagcacttcgaccacttccagacgatgattcgcctaggctcagctggctccgcgtcagaggaatatccagctacagaccccaccgtacttcttcagatccgctccgctcttgagggggagctccgacagttcctcgagaaggaagctccgagctatgcgctgcgagaccagcagaaggaggagcagctccgcaccttcgtacaagagcgagctatcggtcgtatagaccaagagctggcatcatataagaccttcacgggtcgcgaggccgagcttgaggggaaggtatggcatcaggaggcatacaagcgtggtgaggactcaggctacaccctccgaatcccctacactgtggagaagctcttcgaggggaagatcaccttcgggcgagaccatcagctacagctggactctcttcagctccccacgagctactactccttcacctacggctaccagcgcggggagatcttcaagtcctttgagggtagagggcgtggcattgacaactcgatctttgccgtgctcaatggcccgatggagcccacgggacagaggtattacttcggtgagcgctatctgacgctcatccttccactcaagacctccacggactaccccaagagcagtcgctataccatcgctatcaccctcgagtacgaccaagccaagtacaaggacagccctcgccaacttatcccccgctacgaatatggcttgggcgacacgggacaggaagggccactcgacccctacctcttctatagtatctacgacgagcgccagcattggggcacgatcctggtgcgaaactatgcccccaactatgtatgggctggccctgtgagcttccgtcccgcaccctaagtaccgacgagctatgatgacaccgacacgacatatcctccagatcatcctcttcataagcgccctatcggctggcctacaaagttgcttcaagcgcgagctggagcacgaggagaactacatcaatatcaagcaagatcccagtattgccgacaacgaagtcctgcgtttccgcaccttcaagctcgatgactatgaccgctacatcatctttggcaacaataatgaggtcagtatcgacggtacggcacagctcccactcctgctctattacgatgggcagaatcgctcggcaacgatagacctcggaggctgtatctatgagtatcagacgcagctggacaagctcaccttccgtggggcactcttgcgcagtccgatcttcacggagccgatagtcatagatgccgagaccctgctgaagcgtcaggggagcacgagtcagagtcaagaccgcttcatcctccgcctcaaagccttcactctgcctgatggcaagcgcgtcagcgtcgatgagcgccagagctatctcgacaagcctctcggcatcagcatcgagcccctctatcacctgacctattaccgcaactgatacgcccccatgaagacaagatatacgctcgtgcccagcatcctctcactcagcctgcttgcgaccctacctaccctcgcccagcagcaggagccagctaagagcaagaccgatacgaccgtgcgccgtacctacgtcatcaaagaggtcaatgtcaaggacaagaagcgagagaagaaggtacagaagaaagagatcggccgagaggtcgtctccgaccgcgatatcagccggcagttcatcctctcgacgaaggacttcgtacgctacatgccaggggtcggtatctctgagtcggtatcccgctatgggaacaaaggcttcgccatacgtggggtagatgagaatcgcgtatccatctctgtcgatggcttaccacaggccgagacggagacgaacgtcgtcttcagctcctatggactcatcaactcagcccgcccacagttcgagaccgagttcattaagaaggtggagatcaagaagggggcttcctccttcgagcacggcactggtgctctcggaggcgccgtgaacttcgagaccaaggaggcccagactatgatcgagcctgggcgaatctatgggatacaggggaagatcggtggagacaacatggccaaggggcgtatctattcgctcggtggtgcagtcgtctataaggggatagaagccctcgctctctatgctgagcgcacaggacatgaggtgcggaacttcgggacaggggagctacgacgtagcatcttcgctacccgccccgacccgatggagtatcggcagcagagcttcctcggcaagatagcctaccgccacggagatcacaagctcacagcctcctactatagccaaaacaaagtgaccgactccgaagtctggtccatggagcctgcctatgtgctcacctcacagcacgagccctactactatgggcacgaccaagtactgacccgtcgctatgacgtcaactaccgattcaccccactcgaatcctcgtggctcaaccagcttaatatctatgtcaatggacagcagtccttcctcgacgccgatacacgtagctccatataccgccccgagatcagcaactttcgccccaactacctcccagcagggacgcgccgtctgctcaaggggatgagcttctacgaccaagctattgccctcaaggctacctccaagccccaagacttcggcgcactcggatatcacttcttcacgctacatgcctcttacctccatcaccatactgcagataagaatgtcgacatcagccgtccgctaaacacctaccgggagggggtgcgctacaaggggcaattctatcgcttcggggaagagctacctcagagctcctacatctactccttccagcgcccagccgatcgagacaacctctccgtagccctctcagataagatccagcttggccgcctcaagtttgacttagggatacgctacgatctcttctcctctcgcacccgcgattggcagggagacaacgacttcaactatctgggatacctcatcgggaatctcaagacggctgggatggacttcgacaaggtcagcatacaagaatggggatttacccccatggcgatcatcagctatgacttcaatccctacctaagcgtcggctacaaattctccacaggctaccgcgtaccgacctcacaagagcgattcttccagtacgtcagtctctcaccagccttcttcgtactatcgaaccccaagctccgtcgtgagctatcgttcaaccatgagtggcatatcggcacagctgatcctaagtactttgcgtacgatctgagcttctactacaacacctataaggactatatagagccactatatggcgtacaaaaggtcttcttggatgggcagaatagagatgtcgcctactcgatcaatgagaataagaagaatgctcgcctctgggggattgacttcagcacgagcctcttcctcgaagaactcctaccacaactcaagcgagcgggacaattcatgctcacgggttccctgaactactccgaggggcgattcagcgatggcacatcgatgcttgcgatccagccgctgaaggctgtcctcgggctggactacgacctccccaaagagcgagcaggtatcagtctacgcgcaaacttcctcaaggcaaaggacgtcgaccagacacgcttcgtcaagagcttctatggtgatgagcagatcagccagttcccctactacttctttcagaatgctgtgacggtagacctcttcgcctacgtcaagctggccaagcacttcaccctgcgtgcctcgatcatgaacctcaccgatacccgctactggctttgggatgacctccgccagatcatcagtcccgtgatgctcgtccagcacagcgacttcttccgtggtggcctggagtccgtcatacgcttctcccagccacgacgctatgccaacctctctctcgaattcaagctatagcccctcgtctatgatggacaagatcatcaatcgctacgcaagctatctccttctcttaggcgccctcttatgcctctccgcttgccaccgctcctacgagcctctgcctcgtgatgagcggcagataagtccagaggccggtggacggctccacatgaatcaagcggagatccaaagccgagccaacgcctacattcgccagctggccttcgatttagctcaccaagagctggagctacttagtgacaaggtggtccgcgactcgctacaaagcgtgttagacaaagcggagaagttcgctgatgcccacctgatctacctctatgattctaagcatcgcaagaggtatctcaatggaaagaagcgtatcgcctacttcctcgagcatggctacctctcctcctacgaagatgatccgagcctggtcctcctcacccttgaggatggcaactactctcagcccgagggtatggactatgtacctcgagacatgagtgagctctataacctctcagcctaccctcgcacgacctcactggagatctcagcgggacaactggagcgtctcgacctgcgtggcctgaaagatttgcgtagactccagatcaagggggctaaagatggactcatcgtcgatgccaccgactgcgctaagctccgagagattcaggtcacagggacgcccaacctcaccatacgtcagcaccccgatgcccgcttcaagctcatcgtcagcaagagctacttctccagcctctccagcctcggcgtagagcaggcgacctcgctctatctcgaggatgtccgcctgcgagatattgacctcctcggcaaggtcagtccgagcatcacatccctatctatcacggtggaggcaggtgacgtctacggagctgatgggctgcgctatcgtcccctcccctttgacaacaccttcatcacacagctcagcaatcagcttcctcagctacagagactacaggtcacctttgctgagcgccaagacttcgaccgagcctcctttgacaagctcaagctccctgctctccaagagctatccatcggcatacgtcctaaaaagggagctgtagcacgcagtagttgggggcgtaatgtacgctttaccttagcagaatgccccgcactccagaaggtcgagttgctccatctctatgccccagagatcgacctttcgccccttaattcaagtaccactccccagctccagcacgttctcttctcaggcgcaacggaggcactcacggcacccagtctctcccacacctttgccttcgatgtggaagtcgaggaagtcggacaaatcatcgtccccccttcagccaagaagaagggcaaccttactcttcgtgatcttgtccatacatccctggatcacgaatacctacgcagtcagttcgcctcggtctatggactggcggtgagtctccctccgagcaagtacgtcccccacaccgatgagcgagagatctggtttgccttcaatatccttgacttcagcggagagcagtggcgaggcttcaagggcttggtctatctccaaggcctcaggggcgtcacctctcgaaatagtcggatcgattacattgacttcggtcacctcactaaggccaatataagtgccagctccatcacagtcaatccaggctgtgtcgtcaagaacgcccccgagggcctacgcatctactatgcttccgctggccagcaagaataatccgccgatgcacctccctatgaataagctatctcgctatacagcactctcgctattcgtcttcacactcttcctcggaggctgccgcaaggaagaggcgcctcacaccacgtccaccccgtctgagactgaggagatgctcggagctgaccgctatgtgctgatgacctacaagagtacgacgatccctgcgggtccgatgaaggggctcagctacaaggagagctatatctcttacttcgaccacctccccacctccgatggagtcaacaatatccttgagaggaataccctcttcgggcgctttggctcggatggcggtggcctgctggaggctcatggccagatctaccgctactccaatgcggtgaacaaccatgcccaaggagatctcctcatcaataatcccgtacgcctcacattctcaccctcagctcaagctatcggcgagcgagcctacctcgagagtgatgccgacggctttagtcaagcggagaaaaacttcgccatcggggagcagctcggcttcctgatccaacctccagttatagaccgtatcatagaggtgacgactttcgaccccaagacgatggcgaagctcccagcaaagatcctcatctccgaagccgacaaggagcgtatccgccagttcatcctcgagaagactcctgctttatcaggtcagcagctcccccgcctcatcctggggatgaagctcatggtactgcacgaagggacactgatcatggatgcagagctccagtccgatgcccataccaacctctctcgagactgctacctcgtagcctacgaagctaagaacggaggccgcctcctctcgctctcctacctgccgaatacaggacgtctcggcactccctccgagctcctacaatatgcccatgacgaagctggcgacctctacctccttgcccaaggaggtgacctcctcggcttctatcagaactctctcatctatcgtatccgccatggtagccatgaagtagaccccgactggcaggtaaagatctcggatcttggcctcagctaccccgcacgattcaacgggatctatgtctaccaaggcaaactcctaacgatggtctctgcccaccagctatcagctatcagaagcgagataccccaagacgagtggcagtactacaccatcgatttggcaacacgccatgcagagccgatagcgtcactacgcccctcttcggccttccgtcagggtgtgaatatcgctacggtcatcgacgggcgcctctatctgcgctatgtccgtacaagtagcgaagctccctacaacggatactatacctacgatgtcgccacaggcctcgccacgccagccttctccgtagccctacaaagtggctatgtcgccgacttcaagaagatcaccctcacacctcagccccgatgataagcagacgcccctacctccttgcgctactccttgcactcatcaccgcctgcaccaatgatctcccgaccgatccctcgggacagaagagtcgcatccagttcccctcttcactcaccctggagaagctaatcggcgtgacgtggaagatagaccacgagaagcaagaggtgatcctcccacaaagtctcgggaacctatccgctgcagcccgacccatactcaacgtagcaggcaagcatctcaactccctctatctctctaagacagggcaagtctatgccacctatgtcatcgaggagtttgggagcacaatcttctactacacaggtacctggactctggaccccaaggcccccgaagagctccttgtacgagtgggctcgcccatcgggggagatctggagtatcggatgaagattcgtcgcttcaacctattgaataacatgctcaccatggaggccttctttgtcaatcccgactacagcttctcggcgctgatgacgggtaagggagctcaagatgactactggagcaaggagaccgatgtcatcgacccatcctggagcgagcgcaatccgattagccaagccccaatagactatcgtaccatcctcggctcctatcgcgtcgatcttgagacctggaagcgtgtcctctatatcgatgacgccctatataatgtctatccactcctctcgcgctaccagcttagcttccagagcaatggtcaggtactgctgagctcactccccgtcctgcagtatgggatcaatatctataaggggacgtggcgtgtcgctgggagcaaggtcctcctcaccttcccgctcttccccttccgaggagatacggaccactatgctggcaccttcgagatcgacgtgatccccccgatagccacgacctatgcgcggcacgacgtcaccctgatcatggagctcgtacgtgccgaagaggagtctaccctcgtccatatatctgagccagggatgatctcggcttacattaccctacacaaggtcaagtccaagtagctacacacatgatgatgaaagtcaaagcctacctcctcgtcctcctctcgatactcctcctctccgcctgtcgtagtacaacggagacgccgcagcttgacctcaatgatggaggcaaaggcctggagctcacggctcgcagtacaggggatacgctatatatacccttttcctcctcggtcaccgatgagcgcttacagatcaccgaggctgaggactggatcgagacagagcttcgtcgtggtcagctcctcgtctacgctgcgcgcaatagtacgcccttcgcccgccaagcagaactcatcctccagatcattgagcgaggagggcgccaggcagcccgccgtatcacgatccgtcaggaggcagacgaatcactggctaccgataggtatctcttcccctatatccctgtcttgggcttccccttgagcacatactatagcaacaaagagaagatctacacgatacctctttccgccactggagggacccataccgaccccatactcttccgcaccaacctctccggcgatcagctacgcataagctatgactacggtgaaggctcgagcgattgggtgcacgacctacagatcatcaagacaggggatagctggggtatcagcctccgtgcagatgcgatcccgacgagtatggcacagcgccgagtacgtatcacgctcgctgatgctcagttcgcagaccaaaagatctcctttgactacctccagctggggcactctaccgtctcgtttgcgcaccccgagcagatgttcacaagccttgggatgcttccccagcagatctctattccgctgaagaccgatctaccgctgagcaagctccacctcactgtctatgtcgacagtcacaacctcgaggggcagatagagcggaatggcgatggcgaggtgatgccagactaccgcgagaagtatcgtagtcccttctggcaatacgccatcgatacgcaggattatcagatggagcgtccagcactacagcgctacttccgcctcatcaagagtccaggtggagtcaccctcacagggcagaccacgacgagtgcagacttcctcgatctctcactctcgatgagcaagggcttcagtctcgtctactgtatcaccaatgatgcgaacgatcagaagctttggggattcctccagctacccaaccacaaccgccatctctatctccacagccagcacagcaagagcgaggagcgtatcacccttccagctgaagcatccgaatttgccctcagctaccggacgaaccttcactttgatgatatagagtggattcgtcctaccttcgtcaccctccccgagcgctcttggggagcggaactccctgtccccgagggctcgactatcgactaccccgatctaacgaatctcaaggggatacgtgtcacagctaacccgctacgcaccatccgacgcttctccatcaccgccacctatggcacgtatgtatggagcgaatatatcgggccgaagctggctcctctgcagttcacttgtgagcaagcgcccttcacgggagtatatgagttcgccaccagcgaagacaccactcttgatctggcagcgctccccgacgatgagagcagcaagatggtcgtcgccacgatcgccctcatcaccaatctctcacaggagcagatccagatcaccaagcctcaggcacgcagtggctggatccaggcagagctcgggatagaccccgagacgggctatgtcagctcgatcgccttctacttggataagaatacgagtggagctgatcgtagcacccagatacgccttatccccccgacaggcgaaggtctatcccccatcatcttcaccatccgtcagacgcactaagcacgctcagcacgtatgaactaccgcatcgccctcacggcgctcctcgccatcctctcccttctctcctgctcacaggaggatcctgccatcgagacgctcacgatagcctccttaggctccgacaccctctatacgggtagggagtaccacctctcggtcacctctactcctcgagtcgagtccccacgtctctcatggagtgtctccgacgctagcatcgcatccatccagtacgggggcgtactgaagcccctacgcaagggcgagcttacggtcctcgtgacctcgctccagtcagggggcaagcgcgtgcgagccagccaccacttcaccctcatctcctctggggtctacctgcgtgaccgctcgatcacgatcaatcccctcgagacctacacgctcccctaccgcttcctccccgaagactacaagcctacagaggcactctcatggagtgtcgccgatccctccatcgcctcagtcgatagcgaggggcgggtacgcgggctcactgatggtgagacgaccgtctatgtacgcctgggcaatcccctctcaggcttcttctctgaggactcggtagctgtgacggtacgccaccacgcagcccctacctacacctacacagatggagtgctggagctgacgcagaaggtcccagggctcctacccatggtcgctaaggagatgccctacttctccaagatcatcgtccatggcccgatcaatggctccgacctactcttcttcagcgagcagaatgcccgcattgatgccctcgatctctccgatacacgcatcgtcagtggcggtcgcactgtcctccctaagaagcgcttcttcagtgaccccgagcctaccccggtagctgtagaagacgatatcctcccctcggccttcgcatcaggcctcacgatcaaggcactgaccttacctcgcgggctaaagggactcatcagcttcgggctgagcttcatctacaccagcctcaccttccccgaaggctatgagaagatcgagctcggagagttcgctacggagcaactccacctccccaagagcctcaagcgcctctactgtgatcagccgaagctcttcgtggagctgacaggcggggaggatgatctgaagatctcctctgtaaaggatgagcttgtactccccgatggcctcgaggagctgcgagcgctcttggagctcagtagtccgcttaccctcccccgatcgctgaaggccgtcacccttaccgggcgcttcgatgatatcacctttgctggaccctcagccatcaccacactcagtagcaccttcttcatccagcaccccaatctggataagggcccgctctccacgatccaggccaagacactccgcctgcctgaggggctcgagacgctcggagcacgcgcactggctgctggagcctatggctacttcatcagcaatcagcagatcgacctgaggacggcactccatatcaagcagctcctcctcccctctacacttcggagcataggcgaagcggccttcttctccgcacagatccaagagtccgtcacgctcccccagcgcttacgcaccatcggcccgctggccttctacgccagcagcctccctgagatcacgcttccagagagccttcagcgcatcgatgatcaggccttcgccctatgcggatcgctggagaccgttcgagctctcgggaagacccctccgatactgggctctatggctttcttccgtacgacaaagcaggggcgcatcgagcgtctcatcgtcccacacgggtgcaagtcagcgtacgtccaggcaggctatgcacctttcttcttcgacatcgtggaggctactcattagtcccaccatctatcgcttatctcctatggcaagcaacttcttccccaagcgtcagtggtatctcaccccactccttttactcttactcatcctcgtctgtggcctacagagctgtagcaagggtagtcctcaggagcccaagtccagcggcctcgccagctctctatggactgaggggacggggacgatgctcctcgacttcgtcagtgacagcgaagtgcgcttcaccctcaccccctcggggagccctcgcacgatgagctacacgacctcctatcgcctcgaggggcagacgctctacatcaccgacatcatccgtaccacacccttcggcgaagcgatcctcttgaaggacttccgcgcggaaatcagctcgactaagctcgtggctaacttcaccacggcattagtcaccatcgacccagagagcaagacaccatccttctccccccaaccgctgaagggatatatcttccaccgcaaggcatagcatcagtcctcctctatatgatggcgccccacctccctctgcgggaagtggggcgctacttttatgctggtaggtgggctatcactaaagcatcgtgaggcgtgggagcaacttgagaaacgcgaagcaatagtgatccgcagtacagaccagtagtcatttgcaatcgaaccactactggtctgcactcggaccactactggtttgtattatgaaccactactggtcacgctgcggaccactactggttcacacctcgaagtagtagtggttcgcactccccttctctatacccttatgctctacgcttcaagagggagtgacttcaccatatacaaaaacaaaagctccccctgtgcgaaagcttcgcacagggggagcctgcttgattgggcttagtgtcagagacgactacttagctgcagggatttccttgaggacctgcaggaggtgacgccaccagaggtctaccgtcttgatctcgatacgctcagcgggtgagtgtacgtcacggagcgtaggaccgaaggataccatatcgaggtcgggatagacatcgaggatcagaccgcactcgagaccagcgtggatagccttgacagctgcttccttgccgaagagcttgcgataagcatcagccgaagccttcaggatagcagagtcggggttgggcttccagcctgggtaagagtcggtgaccttgacatcagcaccagcgagctcgaagacagaggctaccatctccgaagcgctgtcgcgcaggctcgttgtggagctacgctggctggtttcgacgaggatgacgccgtcacgctgcttgatagaagcgaggttattcgacgtctctaccagattttccagctcgtggctcataccgagtacgccgtgagggcaagcgtagagcgcacgtacgagagcggacttcgtcttgcagtcgatgacctgtgcaggagcagcagcgtcttcgatatcgaggcggaccttggggtcgacggccttgagctcattgcgtacagcagcatcgagctcgcggaggagttcctcagccttagccttgtcagcgggcttgacaccgatgagcgcgtgagcttcgcgggggatagcgttgtggaggttaccgccaccgatctcagcgaggcaccagtcgaggttcttctcgagagcgtagaggtagcgcgtgaggagcttattagcgttgccgaggccgacgtggatctcaccaccagagtgaccgcccttgaggccagagacggaggcacggagccatacgagatcctgaggagcagccttgtactcgggcttgaaggtagcgacgatacccttaccgccggcgcagccgatgaagagctcaccttcgtcctcgctgtcgaggttgatgaggatcttaccagtgaggaagccaggctggagggcgaaggcaccggtcataccggtctcttcgtcgatggtgaagagggcttcgataggcccgtgttcgatgtcgtccgaggcgaggacggcgagctgtgcagcacagccgatcccgttgtcagcaccgagggtggtgccgtcagcatggagccattcgccatcgatgatggtacggatggggtcgttgtcgaagtcgtgcacggtaccagcgttcttctcgcataccatgtcgacgtgactctgcaggatgagcttgacacggtcttcgtagccaggggtagcaggcttgcacatgacgatgttgcccaccttatccttcttgtactcgataccgtggtccttagcgaacttctcgaggtaagcgatgatcttctcttccttcttcgaggggcgggggacttgtgtgatctcatggaagtacttccagacaatcttggggttcagctctgtaatttccattgctttacttgatgtttacgtataggtaaatgtgttggcagggcgacaagccacacttttctgtacccctcgtagtacacttaaggccttaatcagcgaaaacttgtacctttgctcccaacaaatataacgataaaaaacaagcatggcactccttccgatagcactcttcataggtgcagtcatacttttcagtctctaaaggcaaagacaaagagtagtatgtcactattcctcatctcactcctcgctatggggctcgtggtcttcctcctctctatcggggtgatcttcaagaagaacgggcgcttccccagcacacacgttgggggtaaccgagctatgcagcagcgtggtatttcgtgccacacgtcacagcacaaggacgcccagcgccacaagactctggctgagcgcatcgctgcgaacgaggggtaagcgacctctatagcccccactatccaccccgcatatccattacaaagcataatctacctatgacaaagaaaggtttcgtaagcctcggcacactcgccatcgcactcaccagctccctctgcctctcctcctgtggagggaacaaggccgagcagaagtctacccccaccactcccgttgaagtacaagctactggcctgcccattgctcttgtgaatatggacagtgtcacctcacagtataagttcgcacaggaaatcaaggaagctctcgagaaggatgctgccgctcaccagacccgtcttcagggcaagagcgctgccatccagaaggctgcagccgacttcgagcgccgtatgcgcatcaacgctttcgtctctgcagaagcccagcaggctgagcagcagaagctcatccgcatgcagcaggaaggccaggctctcagcgctgagctctccgaaaagctcgctctcaagcagcagtccctcctcgaggatatgatgaagtcgatccgcgagcagctcaaggactacaacaaggatggccgctacaagctcatcctcaccaaggtcggcgacaacatcctctacgctgaaggcgcgctcgacatcaccgaggacttcatcaagtacctcaacgagcactacaacgctggcgaaggcgtccaggctaaggcggactctaccgctaagaagtagtatcaccccgacgggcttcatcgccccaaggtacaccgcataaagggggagcagcatcacgctgctcccccttattatttggatctacacccccaccctatataggatggcggtctattcctatatagattgatgagctgacctatattggtcgcgatgtgaagctatataggtcacgacgcgaacctatatagatcggagcagtgacctatataggttcatagcccccctccacaagaaggagagaccagctaccagagaaggagctatccagaccttgtagaagccgcctgcacacgcccccccaaaacaaagacatcgccccgtgattcaggacttgaatcacggggcgatgcgtatgagtctgtatggggaggtgcgagggagaagcttagttctggctcgctttcgcctcttcgcgctcggccttcaagagggctgcgacctcctccagctgcgtgtagaactcttcgccaaaggcgcggacgagcggtgcacgcaggaactgatagacgggtacctggagcttgcgcccgagcttgagcgcgcacttgcagatcgaccacttatggtagttcaccgccgtgaaggtggggtacttcgtcaggcgcacgggatagagctgacagctgatgggcttgatgaagtccgtcttcccttcgccatagaccttctcgagggcgcaggcacagcgtccctgctcgtcgtaggtggtgaagacgcagtcacgcccattcacgatagaggtcacctcgtcgccatcttcatcgaggtagctgacgccctgctcctcgatgatcttgagggccgcaggagagaggaggtgacgcacatggggcaggcactggcggagctgctccgcttcgccctcctccagcggcgcaccgctatcgccttcgacacagcactcccccttgcaggtgtcgtagtcgcagacgaagagtacgtcgaagaggtcttgactgacgatcttatcttctatttggatcactcggcaggccctcctattatcggatcttcagcgtgacgatggtcaccacagccagcagaatgccgatgagccagaagcgcatcgtcagcttggcctcagggatcttagcgataggacgcttcaggatactatccgtagccgctccgccagggagctggaagtggtgatgcaggggcgccatcttgaagacacgcacgcccttgcccgtacgcatacgggtgtacttgaagtagaagcgctggatgaaggaagaggtaaattcggcgatgaagataccgcagaggatgggcagcagaagctccttgcggatgaggatagcgaagacaccgatgataccaccgagtgccagactacccgtgtcgcccatgaagacctgtgcgggataggagttgtaccagaggaagcctgccgtcgccccgacgagcgtagcggcgaagataaccagctcttcggcccctgggataaacatcgtattcaggtagcccgccatatcgtggtgtgaggagacgtaggcaaagacccccagcaccaccccgacaatagccgacgaacccgaggccaagccatcgacgccgtcggtgaggttcacaccattggagaggagcatgacgacgacgaccgtcatcatgatgaagatggtcaccccgacgatcttcttcacccctggatcagaaatggggaggatctcagagtaatcgaggttattggccttgaggaaggggatagaggtctcgaggctcttggtatcggtggtctcgaagcgaatctcacgcacaccgccctcacggacgatctcgctattgcgcttgatgacgaccgaggggctgaggtagagcgtcacaccgacgatgaggccgaggacgacctgcccgatgatcttgtagtgctccttcaggccgttcttatccttcttgaataccttgatatagtcatcagcaaagcccagaagccccatcaagagcgtcgtgatgatcatcaggatgacgtagatattgtccagtcgcgcaaagaggagcgtaggcaccaggatcgccatgatgatgatgacaccacccatcgtgggggtgcccttcttcgtctgttcgccttcgagaccgaggtcacgcaccagctcgccgatctgcttacgacggaggaagtcaatgaccttgctcccccagatcgtgctgatcaggagcgccacgatgagcgctaagcccacacggaaggagacgtaggtgaagagacgtgagaaaggtaaggcaataccctgacgggtcaagtactcaaaaaggtgataaatcataatcgtgtgtagagtgaaatactaagcttcgtgagcgaactgctcgaggatgatctcgcggtcatcgaagtgatgacgcacacctgcgatctcctgataagtctcgtggcccttgcctgcgacgaggatcaggtcgcctgcagaggccagcatcgtagccgtgcgaatagcctcggcgcggtcggtaatagagagcgtgcggctcagctcttcggggctcaggccagcacgcatctcctcgatgatcgctacgggatcttcgctgcggggattgtcggaggtgaggatgaggcggtcagcacggactgcagcctcgtgcgccatgatcgggcgcttaccgcggtcacggtcgccaccacagccgacgacacagatgatcttcgagccctttgagcgaagactcgagagcgtctccagcacattgatgagggcatcgggcgtatgcgcatagtcgacgacagcgatatagccacgcttctcggagatgaagctctggaagcgtccgtcgacagcggtgagctcgctcaggcggcgcagggcctcttccttcgacataccgaggagggtcgctgccgcatatacggcgaggagattgtagacattgaattcgccgacgagtcgcaccagcacctcgataccagcgatacgcagctgtgtgccgtagggatagagctcgaggatctcagcgcggtagtcagcagcggcacgcagggcgtagctgtacttatgcgcccgggtattctgcagcatcacggcgccattcttgtcatcgacattcgtcagcgcaaaggcatccttgccgagcccatcgaagaagctcttcttagcacggagatactcctgcaccgtgccgtgatagtcgaggtggtcgcgcgtgaggttcgtgaagataccgccacggaagtgcaccccagcggcacgatgctgcgccatagcgtgggagctgacctccataaacacgtgcgtacagcccgctgcctgcatacgcgagaggagtgcctgcagctcgggtgccgagggcgtcgtgtgcgtagcggggacggcttcgtcctcgatgtagttgcacaccgtgctcaagaggccacagcgatagcctgccgcgcggaagaggcggaagaggagcgtggcgatagtcgtcttgccattcgtccccgtgacaccgacgacttgcatcgcttgagaggggtggccgtggagtgccgagctggtgagcccgagcacctcagccgtagagctgacgacgatataagcgacgtccgcgcgctgctcctcggggagcgtctcgacgaggacggcacgtgcccctgcttcgatcgccgcggggacgaagcgatgcccatcagcatggacaccgcgtagggcgacgaagagcgtcccaggcttcacggcgcgggagtcttcggtgatatgggtgatctcacagcctgcgatgagtgcggggtcggagggtgaggtataggcaatgccttggagaagggtgctcagtgtcattggatatatagaattgatatacgtcgatgaggggaaagggagactggaggagccgtgcgccttaggaggcgaagcccagctccaggacaacctcggtgccggctgcggctggcgagcctgccggtatggactgcccgacgacgttgcctgcaccacgcaggcgagggttgtagcccatcttacgcaggaggtagacggcatccatcgcactcataccgacgacggcaggcacacgaccattcgttgctggcagggagcgggcatgtagcgtcgtatcgacggcgatgaagagcccagcatccttcggcatacgaggcgtgggcataccgagctgcgccatcactgcgaggagtgccgaggcacggcctgcggcgatctcattcgtatatgccttgggagaggatgagcgacggagcgaatccagagggatcggatcctcgagtgccaagaggctctcggcgatcttgcggatgataggagctgccatcacgcccccaccagcgctgaactggctcgagggtctgcggatgaccgcgatacaggagtacttaggcgcctcggaggggaagtacgcgcagaaggatacctggtggcgtacgtgccccgtggagtcgcggtagccaccacgacccgaggcgagctgtgccgtaccactcttcccgctgatagcgacgaagggcgagcgcgccttcttccccgtaccctcggtgacgacacggcgaagcatctcttggatcgccgtcagcgtctcgggcttacagatctgctcacgcacgaccgtcggctcgaaggtcttgatgacctgatcctgtctgcggatctcggagacgaagtaagggcgcatatagcgaccaccattagcgatcgcattgaagaaggccagcgtatagataggaggcacctgcgtctcatagccgtaggacatccatccgagggtggtattataccagcggtcggggttgtcggagcgcttgcggatgcgggccttctcgtagccatcgatctcaagcttgaggtcttcgccgaagccgaggttacggatcttctgcacatagtcatcggggcgcgactcataggcacgggtgatgatcttcgccacaccgacattactggacttgatgatggtctgcgctacggagagacgcccatagccaccgtggtgggcattgtggtcacgtatgaccttaccgccgtacttccagaggccgttgcctacgtcgatggtatcattgggatggacgaccccgtcatcgagggcgaccatcatcgaggcgaccttgaaggtagagccaggctcactcatatccgacacggccatattcaccgtctcgtggtagacgccaggtgcggtgcgctggaggttggagatcgagacgaccttacccgtcttgacctccatcaggacgacggtaccgctctcggcctcgaggtaggagagctgctcgcggaggttgctctccacgatgctctggatattcatatcgagggtcgtgtagacgcttgccccatcgacggggggcttgctgatggtctgctcgtagcgacccatattatagaaggagagcttctcaccgagctccccacggaggagatcgttgtagcgaagctcgagcccgaagcgtgccttcgtcagcccgccatcggtacggtcgtagatatgcccgatggtgcggtaagccagcgaaccgaagggatagacacgacggctctcattctccgtatagataagcttgctgaagaggcgcttcttatacctattggggcccgtcttatggatgacgaagggctctgcctgctcgaaggcgcggtactggacgtagggtacgtcggcaggatagaccgcgcagtggcgggacttggtgtcgaagccttgcttccagcgtgccttgagcttggccttagtgagcttgcgtgctgagaggtcgaaggtattggccatcagctcggccagcgagtccaggccggcctcatactcggcgcggagcttgaggatctgctcgcgcttggcctgctgcttgctatcgccatccttcggagggaggggctgacgcagcggctcgagggcttcgtgtccgaagtcaaagaagaggcgatagacgggggaggtgacggcgacagggcgcccatcacgggcgtagatcgagccacgcataggctcgacagcgctgtagcgtggggggttgaccttagaggccatctccgcatagcgcttgccgtcgggactgaggatgaagaagacaatgcggagcatcacgaggaccatcgccagcgagataaaagccacgacccagggatagcggtcgtgggtgaggcggtgccactcgacaccacgctgggacttgaagaagagtccacgggcgagggccttagccgccgcgacgaaggccttgagcttagcggtgattgtacgcaggttcattgacgaatctcagtcgtaggaagggggatatacgtggggttagtgaggcttgggcgtaggatactggcccgagtcgacaaggagataagggggctgggtagcgggtacgagctggagctggtactggtcgaccttggtcgtgatgttgttgatacgctcatactcgatgagtgccgccgaggtgaagagggccttgtagcggatatcctccagcttcttctccagcgaagtgatctcacgcaagctaccctgatagatatagggccatgcgatcatcacccccacgaggaagagacagtaggcgatgaagcgaatattcttccgaaggccgggcaagccccacaggtcattctcgatccactcaatgaggccgcgctcgcgatcctcttcgccctcatgggcatcggtatagtggggctcatggggggtatccgcttcgtagtggcggctctcgtcggaggggatatattcgtctggagtcatcggtaagggtagaggtattgggagggatcagagaagctcggcgatacgcagcttagcactgcgggcacgaggattgcgggcgatctcctcggcagaaggcgtgatgggcttgcgcgtcaccagacgccaagccgaagccgaagagccgtagatacgggcatcagccgagtcatcgccctgacggaggaagttcttgacgatgcggtcctcgagggaatggtaggtcatcaccacgaggcggccaccgggacgcaggacgcgcttcgtggcttcgaggagctcttcgagagccgtcagctcgccattgacctcgatacgcagagcctggaagatacaggagagctgcttcttctcttggtcgggacgcaccaaggggcggacgacggcgatgagatccccgacggtctgcagaggtgccgttgctcgggcctgcacgatacgctgggcgaccttgcggctctgcttcagctcaccatagcggtagagggtatcggcaagagcggcttcgtcatactcgttcaggaggtcacgcgctgagcggcctgcgcggttattcatgcgcatatccagcagcggggtctcgtcacggaagctaaagccacgctccatatcatcgaagtgatgggaggagacaccgaggtctgccaagagcgcatccacctgccccagctcttcatagtagtccatgaagcgctcgagatggcggaagttcgaggcgacgaacgtgaagcgctcggtctcctcggctcgcgccgcagcatcaggatcttggtcgaaggagtagagatgcccgccgtcggagaggcggtcgagtatagcacgtgagtgccccccaccaccgaaggtgacgtcgacataatggcctgtgggctggaggttcatcccctcgaggcactcctcgagcatgacggggacgtgatagtctactgcttgtacgatactcattgggctataatgtcttgcaaaggtactcaatatagagcagaatcttcatgattttttcacgccctccactcttatttacagcacgggcatcgggagggatagcaacacttctcctaagcgtagcacggccaccaccccagcgggagctggagcggtggccgtgctatatcgtgcgatgtggcggggaggagcgaactacttcgtacccgtagccgtaatcttcagatcgagtccctggtctgcgattgccttgaggacgaaggccccttcaccctgagtcaggaggtctgaaggcatctgcttgaagagggtattcgggatggagatctccatatggagcaggttaccttcgcggacgacattcccaaagggaaggttatgagcagagagtttaccatccttcagcgcaagcgtcaacttcgtattaacacataaagctccagtggtaagcacagccgtcttgcctttgatatagacaaacctgggctcaaaaaccagattagtaaagagagcactcttgaagatgtggtctgctaccttatactccttgccctcgatggtgatggtctcgggggaaatcgtcggctcaccaagatcccacaaaccctccagatacttaatagcgacactcgacttaggtccattggggtcgtccttagagcacgaagccgcgccgaggacgagactaccgaagaaaagggctactgcccactgcttgatattcatacgacttatacattagataggttaaaattatgcgttcctaaagagcggataaggcaagcatcccgcacgcgctcggggtgtgagcgaatataccgatagcccgacgaggatatccctcaggctatagcactccgtaaaggtatcaaataatcacacacggccaccaccccagcgggagcgggagctggagcggtggccgcgctatatcgtgcgatgtggcggggaggagcgaactacttcgtacccatagccgtgatcttcagatcctgtccctggtctgcgattgccttgaggacgaaggcaccttcaccctgagtcaggaggtctgaaggcatctgcttgaagagagtattcgggatggagatctccatattgagctgattaccttcgcggacgacattcccaaaaggaaggttatgagcagagagtttaccatccttcagcgcaagcgtcaacttcgtattaacacataaagctccagtggtcagcacagccgtcttgcctttgatatagacaaacctgggctcaaaaaccagattagtaaagagagcactcttgaagatgtggtctgctaccttatactccttgccctcgatggtgatggtctcgggggagatcgtcggcttaccaagatcccacgaaccctccagatacttaatagcgacactcgacttaggtccattggggtcgtccttagagcacgagaccgcaccgaggacaagactaccaaagagaagggctactgcccactgcttgacattcatacgacttatacattagataggttaaaatcatgtattcccgaagagcgaatatggcaagtcccctactcgcactcaggacagagcgaaggtatgaaatggcagtgactataccaagcacgctcctcctaagcgcacgacggccaccaccccagcgggagctggagcggtggccgtgcgacgtagttagatgtggcgggagaagcggactacttcgtacccgtagccttgatcttcagatccagattctgatcagcaatcgccttgaggataataccagcttcgctgttagcaaagtggctcgggggcatctgatccagaaggttattagcgacagcaatctccagcttgagctggttgccttcgcgcacgacactaccgaaggggaaggtatggaaggagagcttgccctccttcaccgtgacgtcgaaggtcttctctacgccttcaacgacagagatgagggtagccttttcaccttcgatcttgaccttagagggagctacgctcagcccattgaagatgggagccttgaagatatggtcagcgaccttgtactccgtgccacccacggtgacggtctcgggggagaacgttaccccgctgagggtccacgtacctgcgagatcctcgatagcgatgctcgtctcaggcttcttaggttcgtccttagcgcacgaagccgtaccgaggacgatagcaccgaggagaagggctgctgcccactgcttgatatacatactgctttgttagttattggttagagaatatactcccgtagggcaggcgaggcaagcgccccgcgcgctccagggagggagcaaaagtacgaaatgacgaggagcttatgtcacaggacactcctctggggcgagctactcaccgagtcatctcttctcaaggagctaaacgctaatgatataccctgctatatgtagagaagcagaatacctaatagtggggatggggtcaaatacccgaaaaagcactcctgctcttctaccccgtacaaggctacttcttcggagagaaaagctgggagcagtagtggagtgacttccgatgagcgcgagtaaaaggtgcggacgaatggtagataagttccgtctacgtacgtggatctaatgactacgtgcgtagtcgtttggatttacgtacgtagtctttaagaccacgtgcgtggacagaggaaaggcactacgggagggggctttttcccgcacggaaatagcactttttcctccgatggataaggaaaatctccgtgcaaagcgagggccattaagtggaatccctcgcctcgtctcgggggagctacgcgagtcgtcgtatctttgcacccagattatccccacgacattcatgctgatcaacgaaatattttacagcctgcagggcgaaggtgtgcacatgggcaaggcctcgatcttcatccgcctgagccgatgcaatctccgctgcagcttctgcgacacggagtttgactcgggcaccgagatgaccatcgaggagcttcgcgacgccatcgccccctaccctggacgccgtatcatctggacgggtggcgagcccacactccagctcaccgaggagacggtggcttacttcaaggccctcggctaccaccagtccatcgagaccaacggcacgcgacgcccacccgctgggctggactacatcacctgcagcccgaagaaagaggcgatgcagctcctgcaccgcaacttccccgacggcgtgggcgaattccgcttccccgtgggaagccctgctgacctaccgccagcggtgagcgaactgccccccgctggcgcctacctcctaagcccgatcttcgtcggcgagacgcagagtgaggcggacaaggcggccatcgagctctgtgtctcctacatcctcgagcatcccgaatggcaactcagcctacagatgcacaagcttatccacatcccttagcacagctctgcgccatgcttcggccatctcgtcgcctccttcgcctcctccccttagccctcctcctcgccctcagctcttgtgctgggagcctcctctcacaggctcgggaagctgagcgcgtgggagcccactacgaggctgagcgactctataaggagctctataagagcaccccgacgaaagagcgacagcaccgtgcgctctacagcctacgtgctgccgaggcggcctgccgaggcaggcgctatgccacagcaagggctctactgcagcgtgctcagcacctgcatctccccgacagcctactgcaaaaaagcaagctatacacgaccttatccacagaagcgctccaagcagaagatagctctccacaagggctgtatgaggtggagcgcttcgaccgtctccgctctacacggagtgagttcggggtaagcttcacccccgacgggcgaacgctcctcttcgggagccaccgtccgacagccctctccaagaacatatcccccgtgacgggtgagcctctcgggcgtctctaccgcctcggccagcaggccgatggcacgtggctcagcgcccccgacagcctccagggccttgccgaagcgacggcagagcttggcacaccgagcctaagccccaacggccgacggctctattacacctacgctccccagcgccaaggggagcacaacacgcctcagatctgggtcgccacccccgacgaacgtgggcgctggcagcccagcggcccccttcggctcttcgccgatagcacacgcctcacagcgcaccccgcagtcagtccctcgggtgcacgcctcttcttcgtcagcgaagcacccgacaaagcccgccaagacaaggagctctactacgtcgatctctatggcgatgccctcggtgcacccgtacacatcacgggagtgagtagcacagccgacgaactcttcccctacgccacgaacgacagcacgctttacttcgcctctgaccgtgcggggggcttcggtgggctggatatctaccaagcgacccttcacagcgatgggcgcaccaccctccttcacctcccctccccgatcaatagcgaggctgacgaactgaccttcgctcccaccccagcgccacaggcttggccgagtgcggagcccctggccgaggcggggcttttcgcctcctcacgcgatgatgcgcgtggcctgccgcatctgtatgagttccgtcgccgtcagatgaccacgacgatcaccggctacgtcctcgatcgcgaggaggagcccatccgtggagcgacggtgcgcatcgtcgggcgacgacccgacgggatagagcggctcatcacgaccgatagcaagggggccttccgcctcacggtagcgcccgacacggagtacatcctactggcgagcagcagggactacctcaatcagttcgtccgcctgcgcaccgatccccagcaggcgctgagcgaagagtacacggtagagttcttcctctcctcccgcgtgcgccccgaggccctgcgtgaggtgtactacgccttcgaccgtgccgacctactccccgagagcacgcccgctctggagaccctctaccagatgctcaccgacaaccccgaggtgaagatccgcctcaccgcccacaccgaccgacgaggtacagcaagctacaatgcccgcctctcccagcagcgagctgagtccgtcgtccgctatctcatcggccgaggcatcgcccccgagcggctggaggctatgggacgcgggggcgatgagccctacaccgtcacaaagcgcaccgcagccgtgcaccccttcctcgccgtgggtacggtgctcacccccgacttcatcgccagcctcacgaagcccgaagagcaggccatatgcgaccagctgaaccgccgcaccgccttcgaggtgcgtgccacgccttagccctccacacgacacaaaagcgccacggggccgccttctccagcgtgagaaggcggccccgtggcgtaaatggggactataaaggcggagctatgcgcttagcagcccgagccgtcgatattgcaagcagcaccctcggcaggacgtgagcgcaggcctgcgtcttcgggggaaagcgtcacacgcccatcctcgagcacgaagcaggggataccagccgcaccgcgtgccttggcagcagcgaaagcggggtcgttgtcacggagcttgaggaacgccttgagctggcggatatcgagtccgaagtcaatcacttcgtagcgggcatcgccctggacctggtcccagacatacgtgcagtcggggcaggattccattccatagatcttgatcattgtcttattatcgggtcattaggcaccacgagagggtgcagtgatgaattagagagaaggaggagaagggcttacttgactacggggcgaccctcggccgtccaacgcatgtagccgcccgccatgtcgcgcacacggaagccctcggcctgcatgtaggacgcagccgcgttgctacgcttcccgctacggcagtagacatagtaggtgcgcttcttatcgaagtgcttgataccctcgatgaaggcaggctgatcgagccagtcgaggagctgggcaccctcgaggtgcccttcagcaaattcgccaggtcgacgcacgtcgaggatgaaggccgtactatcggtacgagccgtctcgatgaagacctcgggagtgagtacggggacgtctccgtcgggagtgccgagggcgcagctactgagcgcagaggcaatgagtgtcatcagatagttcatattaatagggtgtgatatgtagggcgaggaggacgccctacagctatataacaagcaatgtgggcaaatggctcgctttcgctaactttgtaggctacaaagagtagcgacaaagcgataagacatcatggctaagacttcaggtaagacatcaagtaatccacgtggccgccgccctgcagcagggggagcgaagaggaatgcaccctctccgcttaccacgctactcggtggcctgaaggatctgatgaaggtgaacttcgacaaccgtcgcatccccacccttattgggctggcgctggcggcgtgctccctcttcgcctgcttagcactcatcaccttcctcttctctggggggagtgaccagagcctcatctatgccgctcgagatggcgaggctgcggccgagctggggcgcgaagccaagaacatcttaggcctgcctggggcacgtcttgcagactacctcttcaaccagctcttcggctgggggattgtcttcgcgctctcctacgtcgtctacctctttgcccacctcatctggcgcccccgtatcgcgccctaccgctacatcacaagcttcctcatcaatggcttcctcctgctctgggtctccgtagcagcagcgggcctgcagtcgctcttcccctcggatagcttcctgcgctggggtggtctgcgcggtgaggagatctttacctatatatatagaggcatcggcatcgctggcctcctcggcgtgctggccttcaccctactcatcttcgctgtgacgtgcagtagtcgcgtgctcagcgccatacagaatcccaaggtgccgaaggtaccccacgtctccgtcccacgccctgagatgggtggcttcttctcgcacctcttctctcgcaagaagagggacgaagagcctcagagcgaagaggagggggagagctacagccaagacgaagatacttggcgtgacgagcctccgaagcccaccgatgacgaggagatggacgtgcaggaggaagaccccacgccttacgtagtgcatacgcctccgacggctacgacttcgcacaccgcagaagcagcccccagtgcgacatctttcagccgcacgacgaccagcgagccttcggacgtccctgagatgatcgtcgaggaagcaccgaaggacgatctcgtcgaggacggtgaccgcaccgctcccgagcccttggctcctggcatccagctcgccctctaccgcaagcccaccatcgacctcctgcgcgactacgaacagggcggcacgggcatcgatatggaggagatcgagtacaacaagcagaagatcatcgacacgctcgccagcttcaagatgaacgtcacgccctgcaaggctaccgttggccccaccgtgacgctctacgaagtcatccccgaatcgggtatcaaggtctcccgcatcaagacgatggaggacgacatcgctatgagccttaagagcgagggcgtacgtatcatcgcccccatgccaggccttggcacgatcggtatcgaggtaccgaactccaccccacagaccgtatctatgcgctccatcctcgcctcacgcaagtaccgtgagcagcaggagaagatggagctccccatcggtatcggcaagacgatcacgaacgagcccttcatctttgacctaactaagatgccccacctgctcatcgcaggggctacaggtcaggggaagagcgtcgggctgaatgccctcatcacctcgctcctctacagcaagcgccccgaggagctgaagttcgtcatggtcgaccccaagatgcttgagttctctatctacgaggagatcgagcgtcacttcctcgctaagctccccgatgccgagcgtgcgatcatcaccgacatgacgaaggtcgtggcgacgctgaactccctctgtatcgagatggacaaccgctaccgcctcctgcagactgctgggcgcgccgtgcgcaacatccgtgagtacaacgaacaggtccgctccggtgccctcaagcgcattgacggacacgagatcctcccctacatcgtgctcatcgtcgacgagttcgccgacctgatgatgaccgtaggcaaggaggtcgagcagcccatcgcccgcctggcgcagaaggcacgtgccgcagggatccacatggtcatcgcgacacagcgcccctcgacggacgtcatcacgggtcttatcaaggcgaacttccccgcacgtatcgccttcaaggtcttctctatggtcgactcccgcaccgtcctcgactctccaggggcgaaccagctcatcggccgaggcgacatgctcttctatcagggcaaggatatgatccgcgtgcagtgcgccttcatggatacgcccgagacagaggctatcgttgaatatatagcgcagcaggagagcaccggctccgcctacgaactccccgaatacatccccgaaggggaggagaatggcgccaagggcttcaaccccaacgagaaggacagcctcttcgacgaggtcgcccgcatggtcgtacagacacaggtgggctcgacgtcgaatatccagcgtaagttcaacatcggctacaaccgcgctggccgtctcatggaccagctcgagggcgccggcatcgtcggcgtacaggagggcagtaagccccgcgaggtctacatcaaggaccaagcgaccctcgagcaactgctgcagaagctaagctaagcccaaggggaatgggccgttttatcattactttataactttgagctatgattatgcgacgtatcatcatgacgctgagtgccgctgccctgctctgcatgggagccatagcacagcgcaaggctacccccgcagcccccacttcttccgtcactccacagagcctacttgagcgtgctgaggccagcctctaccgcacaggtgctaccgtggtagacttctccacgcagctccaggacaaggctggacgcagcgctggatcgacgacgggtaagatgcacctccagggtgatgccttccgcctcgagtacgggacgatcacggcggtctacaccgcagggacgctcacctactacgatagcgccgagcataccctcaccatatccaagccctcgcaggacgagctcctgcagatcaacccgctctacttccttcgctcccgcgctcagggcttcaccagccagctcgaggggaaggtaggtgctactgctgtcgtggccttcaccccacagcagaagagcaatatctcccgtgtcgtgacgaccttccagacgagcaatgggatccctacgcagctggtcttcacggctaaggacaagagcgtcttgaccgcccgtgtcgcgaaggtcagccctcgcacagcctatgccgcgagcttcttcaccctctcggcgaagagctacccaggctgcgaagtcgttgacctccgctaagtaagcccacgccctccaagtagatactcaatggaatttaagaccctcgccgaggtaggcgagtatacgcagctcatgggacgcgtcttcacgctgcctatgcgctggcggatgttcttccgctccgtcatccgagagatgtacagcctcggggtcggctctctctggatcgtcttcatcatctcgctcttcatcggtgcggtgatcacgatccagctgtcgatcaatatgaccaacccccttatcccacgcttcaccatcggctactccacgcgtgagatcatgatcctcgagttctcctcgacggtcatgtgcctcatcttgtcgggtaaggtcggctcgagtgtcgcctcagagctcggtaccatgcgcgtcaccgagcagatcgacgcgatggaaattatgggggtcaactctgcgaacttccttatcctacccaagatcgtaggcttcatggccttcatccccgtgctctcggtcttctctatggtcacggggatcgtcgggggatatatcgcctgtgacctggcgctctcgatgacgcacaaggacttcgtctacgggctccagctcttcttcacgccctcctacgtcggctactcgatcatcaagtcggtagtctacgccttcatcatctcctcggtagcctcctactacggctactgcgtgaagggcggggcactgcaggtaggcgcatcaagtacgcgcgccgtcgtcaatagcagcgtcctcatcctcttctgggacctcctgctcaccaatatcctcctcacctaagcccttccgcactatgatacaagtcaagtcgctcgctaagcgcttcgaggacaaggaggtcatcaagggtatcgacgccaccttcgagacggggaagacgaacctcgtcatcggccgaagcggtgctggtaagtccgtcttcgtgaagtgtatgatcggcctcatccgccccgaccagggcgaagtcctctatgacggccgtgacctcatcaagatgaccaagcccgagctactgcgtctgcgtcgtgagatggggatgctcttccagggctcagccctcttcgacagtatgacggtcgtggagaatgtcctcttccctatggagatgttctcctcagacagctatgacaaatcctaccgccgtgcgatggagctactggagcgtgtcggtctggccgaagctgcgaagaagtatcccgctgagattagtggtgggatgatgaagcgtaccgccatcgcccgcgctctggcactcaatccgaaatacctcttctgcgacgagccaaactccggtctggaccccaagacctctacggtcattgaccagctcatctacgagctcacgcaagagtacaatatcacgaccatcgtcaatacgcacgacatgaactccgtacgtgctatcggcgataagatcatatacatccacaacggactaaaggaatgggagggaagtagtgccctactctcctcgccagatgtgcccgagggcgtccttcagttcatcaacgcaggccgcgtatagcctgcccacttcccttctgaccagcatatgtctctcctcaagaaagattcgctcctgacgcacgtcctactcgctgtaggcgcctccgtcctactcgtcgtcctgctcatctacggcctcgacatctacacccgccacggggatacggtcaaggtacccgacctgcgtggtaagacgctcgccgagatgcagcgcatcctcgatgatgcagggctgaagtacgagatcaacgactcgacgttctcccgcaccgctatccctggcaccgtccgcgaggtcatccccgcacctggtagcgaggtcaagctcggccgcatcctcttcatcgctatcaatggcttccaccagcgtcgccagacgatccctaactacaaggatcagtcggcccgtcagatccttgccctactgaaagggctgggctttgagtccgtcgaccagcgtgtcgtgcctggtggctacgtcggctctgtcgtgggcctgcagacggctgatggcaaggtcgtagaggccggtacgcagctgcctatcgatacgaagctcgtcctcctcgtagcaggtcaggtcatcgatacgctgggtctcgatcgctatatcgaggggtatagcagcagccaaggtgacagcaccgtcctacgcacggcaccagccacacccgagaagaaggatgacggaggcatcagcaatgactggtggtaatccactgactgacgaggagctactcctcgatagcgaagcctgggaaggcgacgaagatctcttcctccccgatggcaccgccgaggtcgagcgcctcgatgccgctgccgtctcctatctccagcatgccgatagctcaccgctctatgagcacttccgtgtcgtagctgacaaggggcaggcgcctatgcgcatcgacaagtatctggctacacgcatgacgggtagcagtcgtagtcgcatccagcaggcgcttgacggagggtatgtcttcgtcggcgacaagcccgtcaagagcaactaccgcatcaagcccctcgacgtcgtcaccctccagctacgccgtcccaagcatgagctcgagatcatccccgagcccataccgctggatgtcgtctacgaagatgaggtgctaatggtggtcaacaagcctgcggggctcgtcgtccatccagggcacggtaactataccggcacgctggtcaatgcgctcgcatactacctgcaggatgatcccctctatgatcccgccgaccccaacgtcggtctcgtccatcgcatcgacaaggacacgagtggcctgctggtcatcgccaagcgtcccgaagcgaaggcacacttagctcgtcagttcttcaacaagaccacccgccgtacctaccgcgcccttgtctggggaagactgaaggaagccgaaggcacgatcatcggcaacatcggccgtgacgagcgtgaccgcctgcagatggcagtctatcccgagggctctcccaagggtaagcacgccgtcacccactacacgctcctcgaagagctggcctacgtcagctgggtcgaatgccgactcgagacgggacgcacgcaccagatccgtgcccacatgtgccacatcgggcacccgctcttcgctgatgcacgctatggtggcgacaagatcctttggggtaaccagttctcccgctacaagcagttcgtccaaaactgcctcacgctctgcccccgtcaggcactccacgctaagacgctgggcttcgttcatcccatgacgggcgaagagatgctcttcgacagcgagcttcccagcgaccttgagcaactcttagagcgctggcgcacctacgcagcgcaggtcgacaacgaataagcataggggaaggcctccccgacataagtcccataccaatagggcggcacgcatatatgatgcgtgccgccctattctattttaggaggagtgaagaagcgatctcgtgagcggggtgataccgacctatattgagagtgctaaggcatcacacgcccagctccccgatatgcctctccgcagcgatacgcaagcccttcgccttatcgcgagtattcctcttacccagcggaggggaaagcatcattttcgtgaagaaaaaagcgccatcccgtagtggtttttccgcatctatgcacgtagtcttaaagaccaggcacgtaaatccaaatatccacgtacgtagatattagagccacgtacgtagctcaaagtggacgtaggcgcgtcaactataaaatcataatacctccaaagagtatttaattctttggaggtattttctgcaaaaaagcactatagctctgtaatcataggtataactatagacttgtgcctgtggtattttactaatttgctattatttcgtagcttctttcacttctttttcgaggtcttctatgcggttctttaaatcatctgataacttttgagcagaaccttttaactttttcagattgaacgaaagtattacagatgaaatacctgtggagataaatgctaaacctgtgaatactactaatgagatacctgtaaagataggattagcaatcaaaatgaacgagaggataatactcaatacgctcactatggctaagttcccccaattcagtacgcctgcttctttttcttcgaaggcaaaaccaagtagctcaaacgaacggaatagcaacgtaaaacctactaccaatggtaatataaacattgatagggcaggatacataagtaaaaagatacccattatcaatgaaataagtccgcttaccaaataccagccccaaccattaagatttttagtattctgtagggcaaagaaggtttcaattatccccgatactaagaacgaaagactaaagagtattgaaagggtaagataagaatcttgtggtgatataattacccctataccacaaagaatgaacaaaatccctaatataaggggaatgtaccagtgttttactgatcttctgatggatttgaaaaaatgcaacataactttatcatttgatgaataacgacgcaaagataaggatattttattgattagcaaaatgagaccattgcgcaagcccatctccttacagcttccaccttcttgcctcgagaattgggatctttaggctgagaagtgggatacctgcacctcccccttgccccttcccgggaggatcatcctcccgagagggggcttttctgggctatttggtgctctggagcacaagaagcctaggcatacgcttcagattgtatgccatagcctccaagatattctgtgtatgc

SEQ ID NO: 72 - DNA, 221545 bp, Porphyromonas bobii
  source 1..221545: mol_type = genomic DNA
cacacaggatttcacgtgtcccgcgctactcaggatacctctaagtccaacgaagattttcggatacacagctatcatgttctatggccggcctttccagaccgttctcctaatcttgtcttcctatgtcgaggtcctacaaccccagttttgccgaaacaaatctggtttgggctggtccccgttcgctcgccactactaagggaatcacttttgttttcttctcctatgggtacttagatgtttcagttccccacgttcgctcactgctctgcagtgtgacatatcttcaatatgccgggttgccccattcggaaatctacggatcaatttgtatgtgccaatccccgtagcttatcgcagcttatcacgtccttcttcgcctccgagagccaaggcatccaccgtctgcccttatctgtttttgcgcctaacgtacttctaacattgctatcagaaagcacgcaggttgtatactaacttattatatatgctctacgttgttttctcgtttgtttttatcaagtatgtcaatgatcgctaagagggccgctggtgtaaaccttgtgacacctcttttgagtcaatcataagtaagtcgccttacttatatcgtcgtcgctaacgcctgtcttcccttcctcagctaccctcgctcggatcagctcttatttgaggtggttcgtttctcgtttgcggttgcaaagatagagcaaaaactaaatacaaaccaaatcttcgcgcaaaatatttctcaataacacccgttgagttgcattcatttccccataagcaagcaacttacaaggggtgaaaaaattttcattctcttggggaagacgggcgatttcgcgggggaagaacgagaggattgagcggggaagaggtgcacttggcggggaaatgaagggggaatagggctggggacggttgtatagcgatataggtaggcgtagcatttgctggggatgaaaggcgtgcgggaagggaaaagccaccgcatactcccctatcccttttgaatatatgcagacgtgagtgatatcaacctatattggtcggcgggcgaacctatattggtcggtgcttcgacctatataggttgctttcgtgacctatatagctttgcccgccgaccaatatagcttcacaccaccctactaaaggtagccttcccacgccccctccgaagagtagaaagcaaccagtactggtcaccactccaaccactactggtcgctattagaccagtactacttcgcagtgtgaccagtactgctccgaccaccgaccaggactgctcgatttcactacctaataaacacgacgctcgcctatcacttgtgcaaggataggcgggcggaaaaagagcgacaccccagctcgaaggtcgggctggggtgtcgtcgtggagtagcgctttataatcttgcgcgagtatgcctacttgagagcatagggattatccgtactcgtaggccagttgacattctgatagaagtacgtggcatcgaccttgttgccaggagcacaaagctctaacgtctgaatcgagacaggatagaggtagtgagcctggtagaaggtatagccatcgaacatatcattgttattagccttcgaaatgatctggtaggggcgatgatatgtactgatactcttggcagagatgttagcctttgatgtcccatctgagataattctcgtctgagtaggatcaggcaccagctcttccttctctctaccatcggggcctgtgaccttcaccgtcttggtaccccagaagtagctatactcatgaatcttcgcccagaagttcacgccctcgatcacatagttcttgacttggtccatagcgcaccagcgaacaaggtcatcgtgacgcataccttcacctgcaaattcacagcggcgctcacgacggatgctatagagcgtaggatcaacggcctgcccctgagagaaggccccccagtcataggaagctctattaacgttggcctccactgacatatctgtagcattgatcgtcgcatcgatcgtcccggtgataccagcacgttggcgaagctgatcccaatacttacgagcatctgcatccagagttctattgagctcataggaagcttcgatgtagtttagataagcttcggatgctctaaggatgggcaccccggagacgtcgttcatctctgtgccgtgacgcatcgaggggtcatagttgtaatacttacgctgagcataccctgtgacatctctgacctcaggcttgtcgatcatattcggacactcatacttcttgacgaccttcttagcatcatcgtagctacgagcatcagactctgcaaagaggaagagctggagacgctcatcacgatccttcttcacattatcgatcgtcacatcattataggtggcggtattacgcttgtagtaaggcagaccatccttcatcaggaaggactctacgagaccacgtgtccagccagagttcgtgcctgtgatcaactgatgggagacgaggtgaaggattctcttatccttgctgtactgtctccacagcagaatctcagagaagccatcaaggcttctggaggcaaacatctcatagtaggaattccagccactaaaggtaggaaggtctggattggtcttgtgcgagttgggggtgagggatactgcgtcagcaacgaccttcgcagaagccatagcctgctcgaggaagaacctcacctcagcatcctgatcgaagaccttacccttattccactccttgtctttccctggccaagtggcatcacctggtacacgtccagtgcctcggtggtgcttctcgaaggtcccttcgtagagggcaacacggctcttgagcagctgagcagcattcttggtcagacgctgattagcggggaaggctggtctcagatacttgatagcggagtccagctcgctgatgataaagcgagcgacctcattacgtgggcgtcgctgagaagccttctgcaaggtctccagctccgtcgggagcgtctgggtgataatagggaagtcaccatagaccttgagtgcctcgaagtaaagcaacgcacgaatggcataggcctccccgatatagtgattgatatcagtggggtcaccaacgatcttaccggcgtagaacttcggcaggacctgctccatgtaccagttcacattacggatagaggcgatcgagggctgaccagtgctctctaccttccacgtagtattgctgaacatcgaacggttaggattggtcgtagcctgattatccgtaccatcatcgtaggtagctatccctgcgtggtagccaccgctcccatgtccaggaaagagggtagcatagtagttgatcgggaaggtaccaagctgctcagcagtcccatagtatgaatctgggcctacctgatcaagaggctccctatcaagaagattacaggaagagagagctaggaggccagaggataggaggaggagcgtcttcctccaataactatgttgtctcataatacttgttctgttagatgccgattagatattgacattgagcccacaggagatcacgcgctgcagcggatagatcttaccaggtccccagtcaccaccagtagcttcggggtcgaagatcttgggcagtttggtgaaggtcacgaggttgtcagccgaggtgtagacacgtaggcgactgaccccgatcttcttcgtgagagaagcagggagggtatagcccagctggatattcttgatacggagatacgccgcattgacgacatagcgggactgcgtctgcatattcttggcgcccttctcgaagaggggacgaggatagcgagcattcaggttagccccattggggtcaccctcaggtcggaagaagtcccagtgctccttgaagcccacagactgccactgcccatggctcgtagcaccgacagaatagggagagttgtcaaaccagtcgcgacgaccaaccccctgaaggaagaagctgaagtcaagaccctgccacgtaaggtcagcattgaaaccaaccttaaagcgaggagcattgtagccgaggcggcgaaggtctccatggtcggacaaggtgttagcaccaccattgacggtctcactaccatcaaggtccttatacatgatgtccccggcctgccagttatcaccccatgaaggacggttagtcttcaggtgctcattcatctcatcgttcgtcttggcgataccagcagtagtatagccccagatctcacccatgcgacgtcctgcgtaccaagtggagagggatcccgtagggttgtagtactgcgtgaccgtctggatatcatccgagaggataaagcgtagcccgtagttcaccttgcctacatagtcacgccacttgagctcagcttcccagcccttagagacgagggtcgcattattctcactgggctgaccggtaccgagggtgaagggcagtggagaaggagggccaaccatatcgcgagtcgtacggttgaagtactccagagtaccctgcagtctgttgttcagagccgcaaagtccagaccgacgttccaagactcaatgcgctcccaagtcagagcacttgatacaataccaggggcattagatgtattcagacgttcgccaccgatgagccaagctgagttagctgtcccgacaggctgagcgaggaaccaaggatagagtgcttgcacctcggtattccccagtgtaccccatgagccacggagcttaagcattgagaaggtcttcttgaggggagagaagaactgctcattggcaatattccaaccagcagagaaggaggggaaggtcgcccagcgcttattgccaatgaagcgggaggagccattggagcggagagagacctcaaggaggtaacgctcgtcgtaagcatagttcagacgagcgaagctccccatcgtagcccaatggttatagcctgagtagagagaaggcttgtcattggtagccgtattgaccgtggggataaggttcgagataagatccttcttggtaccaccaaggtcatggtagttattgacttcaaggtcgagaccagcgatgagcttgacgtcatgcttctctgcgaagagacggctatactcggcatagtagcgaccgttgaagtaattattccgccaggtgctctcaccgacactcgtctggccgtcgtcgccaccctcacgagaggtcaagcgagcaaggccgtccttatcatggctgtagatagcgagtacatcccagtgattgaagttgtaggtcgtgttatagttattctcagcacggaggagaagcccaggcagggggcgtgcttccagcgtcagctgctgattgacacggtcacgttggttgcggtcgacaccaccatcttgcatctggatcgtctcattaccagggatgagatacccgtggacgtcacgcacagggttagtcggccagcggcgagcaatattatggaagaagaggcccgtcatatagcttggtcgggagtattcttcacgtgaccagcggttggtataggagacggtcagccatggagtgatatccgtgctgagcttcgcagtgaggttgtagcgcttgaaggcatcatgtccgtagcggatcaagccctgctgatcgagtagcgcaccactgacgtagtagttcgtcttaccactcccaccagatatggagaggttatgctcttgagaaggagcattcttacggtacatttctgcgaaccaatcggtatttgcccatgagtccgtatagagattccatgctctatctcgttcattccatgaggtccccgagcgcaggtcttctgagatcgtaccttgcttgtaggctacgatacgcttcatgatctcatcggtgaagaccgtcccattccctgcgtttgtaccagcggcattgaagtacttagcgaactgctctgagtccatcatctcagggacctgtgtcgcagtagcaaagcggacattgcccgtataggcaactcgagctcggccttcacggccgttcttggtcttgatgaggatcaccccgaaggcagcgcgagatccatagatcgagcttgcagaagcatccttcagcaccgatatgctctcgatatcattagccgagagagagttcatgtctccctcggagccgtcgatcagaaccaatgggcttgagtttgaccccgtcccgatcgtacccgtaccacggatattgagggccagcgagctattgagggctcccccagagtttcccaccgagaggttcagaccagggatcatcccctggagagcctgcccgacattttgcacggggcgagcagccagagacttagagtcgatagaggagacagccccagtgaggttgaccttcttctgagtaccgtaaccgacgacaacgacctcctgagccacctgtgcgtcatcttcgaggacgacatcgatggtcgtacgccccgagacaggcacctcctgcttcttcatcccgatgtaggtgaagaccagggtagcatttcgtgagacattctggagcgtgtagtccccagtaggggtagtagtggtccctgctgttgtccccttgactcgaatagagacccctgctaagggctccttctgggcatccttgacgacccccttgatggtgatcgtcccctgtgcccaggtgacaagcggactacttaggagcatcgccaaggtcagcagtacgaccctcgcggtaaagtacttggagaaatacttcatcttcgtaagttagtgttagtgatacgtgtatggattgatgtaattctgcatgatcttaagaggagcgggagaatggaatcgtcaagcggctcggtctttagcgatccgccccatgataagtgagctctttgagagggctattcatagtaatgtaggatacctaaaccacatggcacctatcggctcgataggtggtggcggggagaggtgtcaccccgtcctcctttcgacgtgggcgactcggtcaagatctctgatactgatttaatacaaagtctcattgttcatgatcggaataggagctctctcactccttacgggggcaaagttatggatgaaaagcgaaaaaacaaacaattatctatgcatacacttaataaatttattaagtaactcaacacactgaatactaatacgctacaagatcgcgacctgcaacacgcagactaccgtattccgccccaaagcactccaaaccacatttccccacacgttcccctcggattgagcacctacccctaccccccaaaagctgggttagctgtatccattaccatatagggggaagcaaacctatatagatcgtcgggcgaagctatataggtcggtgcttcgaccaatataggttgctttcgtgacctatatagctttactcgccgacctatatagcttcacaccaccccactaaagggagccttcccactacccccgccaaagaagaaaagcaaccagtactggtcaccgatccaaccactactggttgatataagtgaccagtactacttcgccgcgtgaccagtactgctccgaccaccgaccagtactggtcgatttcaccacccaataaaagcgccgtccgcctaccccacagatgggataggcggacggcgtgcttgctaccttatatataaggagagagattaggaggcggagcgctccagctccttgagattctcgagcttcttacgctgcatgaattcgtagataccttcgaggtgctcggtgaccttcccgccaccgaactcatagaccttgctgacgaggccatcgaggaagtcacggtcgtgcgagacgaggatgagcgtgccatcatagttgaggagggcttgcttgagcacttccttcgtcttcatgtcgaggtggttcgtcggttcgtcgaggatcagcaggttgtacggctcgaggaggagcttgagcagagccaagcgcgtgcgctcaccaccgctgagtaccttgaccttcttcgtcgaagcttcgccaccgaacataaaggcgccgaggagatccttgatcttcgtgcggatctcgccctcggctacatcatcgatggtctggaagacggtgcgcgtctcatcctcgatagccgcctgattctgggcgaagtagccgatctggacattatggccgagcgtgaggacaccttcgtgctccagctccttcataatgcagcgcacgagggtactcttcccttccccgttcttcccgacgaaggcaatcttgtcgccacgctcgatcatcaggttgacatcagagaagatgcgcttgtcaccaaaggccttaccgacgccctccatctgcacgggatagttgcccgagcgtggggctggtgggaagcgcaggcggatagcggaggtatcgatctcgtcgacctcgaccagctcgagcttctcaagcatacgtacacggctctgcacctggttggtcttggagtatgtacccttgaagcgctcgatgaagtcggtcgtctcagcgatgaacttctgctgctcctcgtaggccttcatctgctgctcgcgacgctcggcacgcaggcgttggtactcggagtagttcaccttgtagtcgtagaggcggcccatcgtgatctcgagggtacgcgtggtgatgtggtcgacgaaggcgcggtcgtggctgatgacgacgaccgtctgccccgtctcgatgaggaagtcctcgagccactggatcgactcgatgtcgaggtggttcgtaggctcgtcgaggaggaggacatcgggcttctgcaggaggagctttgccagctcgatacgcatacgccagcccccactgaactcgcttgtctggcgcgtgaagtcgcttcgcttgaagccaagaccgaggagcgtcagctcgatagccttgtcgtagttgatctcttcgatagcgtagtacttctcacccagtgcagacacctcctcgatgatcgccatatactcggggctatcgtagtcggtgcgagtattgagagcctcgttgagctcctccatacgggctgccatctggtggatgttgctgaaggcttgctcagcttcctcgaagacggtgcgcccatcttcggtgaggaggtgctggggaaggtaggccacctgcacacccgaggggacgttgaccttaccgcgggtcgcctcacgcgtaccgctgaggatcttcagcagggtgctcttaccagcaccattcttccccatgagggcgatgcggtccttggggttgatgacgaaggaaatatctgagaagaggggtgccccaccgatctcgacagtgagggcatcgactgaaatcatacgctttgcttagagaatagaaggaggaaaggggatgagggagtaaaagatccccctatgtcaggtgtacggacacccagcatagggggacggggcgggcaggctactgccctatctgaaggagggtgaagccggcctcgacggggtcggtatcgaagacgttgcgcccgtcgatgagtagcggagtcttcaccgagcggtgaaggacttcccaggcgggcatacggaatgccttccattcggtgacgtggaagatcacatcgacatcgagcgcagagtcgtagacatcacgtgcgtagcggacacggtcgccgagacgacgccgggcctcaggcatggcgatcgggtcatagacggcgacctcacagccagcctcgaggagggagttgataaggacgagcgaaggcgcctcacgcatatcgtccgtctcaggcttgaaggccaagccccagacagcgacacgacgacccttcagatcaccaccgaagtagcggaagaacttctcgaagagcacgtgcttctgcgactcgttcacagcctcgacagcttcgaggacacgcataggacggccatgctccttcgccgtgcggatgaaggcttgcacatccttggggaagcaagagcctccatagccacagcccgagtagaggaacttgctcccgatgcgggcgtcactaccgatgccctgacgcaccatagagacgttggcacccacggcttcgcagaggttcgccacttcattcataaagctgatgcgcgtagcgagcatagcgttggccgcatacttcgtgatctctgccgaggcgatatccatgaagaggacgcggaagttattgaggaggatgggcttatagaggcgcgtcatcagctcacgggcacggtcgctatcgacaccgacgacgactcggtcggggcgcatgaagtcctcgatagcgttgccctccttgaggaattcggggttcgaagcgacgtcgaagggaatggacacgccacgctcacgctgtgccgcctcgatcgtctcacggaccttgaggtaggtacctacgggcacggtactcttggtgacgacgagacaatagtccgtcatcgcctcaccgatagcacgagctacggagaggacgtggcgcaggtcggccgagccatcttcgtctgggggcgtgccgacagcactgaagataatctcgacatggggcaggacttcggcgatagaggtagagaagtgcaggcgtccagcctccactccacggcgcacgagggcgtccagacccggctcatagatgggtatctccccatcacgcaggcgctggatcttcgcctcatcgacatctacacagtagacttctacaccgaggtcagcgaagcaagctgcgctgaccagtccgacatagcctatccctacgatagcaatgggcataatgctactccttattataatatgtatcggtgttacttcgctggggctgcttcacgcagctcacgggcgatgcgctccatctcttcggcaggaaactggagcttcttcttcaagtcaatatctccctcagcattgataggcacgaggtggatgtgcgcgtggttgacctcaagtccgaggacgaggacagcgaccttgcggcacttcgtcaccgtctggatctgacgggcgacctgcttagcgaagaccatcatgcgcccaagcaagtcatcctcgatatcgaagatgtagtcgacctcctggcgaggtacgacgagcgtgtgaccgggctgtacgggattgatgtcgaggaaggcgtagaactcagcgtcctcggcgactcgatacgaagggatctccccctcgatgatgcgtgtgaagagcgtagccatggagcaaaaagagattagatcgagatattgaggatctcgaagttcaggaggccaccaggcgtctggacctcgacgacatcaccgaccttgcggcccatgaggcccttggcgatgggggtgttgacggagatcttcttctccttgaggttagcctcggtgtcagagaccagcgtataggtcagctcagcacccgtcttagtattgcggatggtgaccttgctcaggatctggatgctatcggtagagatcttcgactcgtcaatgatacgagcgttagcgacctgtgccttgagctgagcgatcttcccttcgaggaggccctgagcctccttggcggcgtcgtactcggcgttttccgagaggtcacccttatcgcgtgcctcggcgatctgacgagagatctcggggcggtgaacggattcgagttcgttgatctcagctatgagcttgtcatagccggcttgtgtcatatagttatatgccatagtcgtagttggggagccatagactccagcctaatttttgcgcggtcttgaccgcaagtaaaaacaatagtgaaccctactccagccgatcgctgtcgtagggttccttcgcaaaggtacgattatttatctaaggcagggcacctgctttatttatttgcttcccccaccctatccaaaccttacgcctcttgacttcccgactcccaagcacagcaggcggggagacatcggcgtatatcctgcagatagcggcagtcgccaccacgcctgtatagagcgacttagccgactatccgcatacgatccgccacggggcaagaccaccccgcaggtccccttcatctgaacctatagaggtctacgggcggaccactatgaaaacgccccacgcgcccgtagtcgtacatcagcgagctggctactcctcgtcttcggcaaagggcaaccactgctgcacccacatccccgggcgaagctcctcgggcggatgcgagagggagagtcccaagaggcggatggggcggtcggcatagtcaaggccgcgaagaagctccaagccacgctgcagaagaagctcaggcgaagagaaggcttcggagaaggaagccgagcgggagagtacagagaagtcggcgaacttcacccgcagtgtgagcgtgcgccccgagaattgacgacgctgcagacgcccgtccagctcctcgacgacctcacgaaggtgggcttcgacgacgaggggctcggcactattctcctcgaaggtgcgctcacagccgaggctcttacgtacccattcatagatgacggggcgctcatccaccccacgagcgaagtcatagaagacacgacccgccttaccaaagtggcgggtcagctgctcgaggcttcgctctcggaggtcagcccccgtgcggatacccaagagatgcatacgctcagccgtagcacgccctactccccagaaggcttcgacgggaagctcggcgatgaagtccagcgcttgcgacggatggatcgtgcagagcccgtcgggcttgcgtgcgtcggaagcaatcttcgcgaggaacttattgtacgacacacccgccgaagccgtcagccccagctcctcacggatgcggcgacggatctcacgtgctatctctacggccataggctccccgaccttgttctccgtcacatcgaggaacgcctcatcgagggaaatcggctcgatgatatcggtgtagtcgtggaagatgccgtgaatggctcgcgagacttcgcggtagcgatcgaagtttaccggcacaaagatgagctgcgggcagagcttacgtgccttcgccccaggcatcgctgagcgtacaccgaagtgccgagcttcgtagctcgcagcacagaccaccccacgcgactccgctccacccacggcaataggcagcccccgaagctcgggatggtcgtgctgctctaccgaggcgtagaaggcatccatatcaatgtgtatgatcttgcgcatagcgaaggagaggaatgggcaggcggcttagggagaagctatcacttcttggggcgctgaggcatcgggcgcgtataggcccaagcccaagcgatgagagggagctggagtggcagtcgcaccaaggcgaaggtcagacggggatccgccgtggccttcatattgagataggtctggatattcgcagggaagaccgcgataagcaagaggacaataccccacgcagcccacacacgcagacgagtcttcgggcgaaggacaagagccactcccagcacgatctcgatgaccccactcagggcaacgagcgcttcgtgagcggggaggtagggtggcatcgtgcgcaggtacatctcggcattcacgaagtgattgatcccggcagcgatatagaggagggcacagaggtagagcccgacgaagtaaaggcgataacgaagcatcggaacgtatagggaaaaaggtgataaaagcactgaccccctaccgcaggtgcgttagggggccaggtagacctgccctaagcgggcaagcgtagtacttgagattattccgctttgagcgtcacacgcttgaaggcagtcaccgtgaggctcttgctctgagcctggaggtactgagcgatggtcagcttgttgtccttgacgaagagctgatcaaggagggtattttccttgtagtacttcttcagggcaccctgtgcgatgtggtcgacgaggttctcgggcttaccagcttcgcgagccttttcgcgagcgaggttgagctcacgctccttgacatcagcggggacgtcttcttcggtgatgccgacgggagccatagcagcgatctgcatagccacgtcgcgagcgacctgagcgtcagtagcttcgttgaaggctacgatcgtagcgagcatgttccctgggtggatgtaagaggtcgtgaaagcaccctggacgaactcgtatacaccgagctccatcttttcaccagagacaccgctgcgctcggtgatgtggtcctgtacgctacggccgtcagccataggagcagcgaggatttcttccttagaagcacccttcttagccttagctacttcgaggatagaggagacgagcttgatgaagtcttcgttcttagcgacgaagtccgtttcgcacttgacgcctaccatgacagcatagtcgccttcgttagcagcgaggatgcagccttcttcggcttcgtggtcgccacgcttagcagcgatagcctggccacgcttacggatgagttcgatagccttttcgaggtcgccagcagcttcttcgatagccttcttaacatcggagagaccagcaccggtgagggcgcggagcttcttgatgtcttccaacaatttactcatgatggtatcttgtattgagttagagttcttgtgattggcagataagacccgaggacgagcgggttagacggctcatcctcggacttatcttactgtatatcgctcccgtcagggagtcgacagggtcgtctcagacggagagcttaagcttcttcggaggtagcctcagccttgcggcgggtacggctgcccttctgaacgagcttagcgccaccttcgccttcacccttttcctggcccttaccttcggccttgcgttcctgcagaccttcggagatagcgccacagatagccgagacgatgacttctacggcagccgtagagtcgtcgttagcagggatgacgtagtcgacattagagggatcgctattggtgtccacaatagcgaagacggggataccgaggcgctgagcttcagctactgcgatgtgctccttcattacgtctacgacgaagagggcattaggcagcttgttcatatcagcgatagagccgagcgtaagctcgagcttagcacgctgacgagagatctggagcttctcgcgcttggagaggttatcaaacgtaccatcagcagtcatcttatcgatctcggtcatcttcttgacggccttgcggatcgtagcgaagttggtaagcataccaccgggccagcgctccgtgacataaggcatacctacagccttagccagctcagcgacagcgcccttgagctgcttcttcgtagctacgaagaggatcttcttgccagcctttgccaggcccttggcgacttctgctgcttcgtcgaccttgacaacagtcttgtgaaggtcgatgatgtggatgtcgttacgctccatgaagatgtatggagccatagctgcattccacttacgggtgaggtgaccgaagtgggcacctgcttctatgagttggtcaaatgaaactcttgacatgatttcgtttacgttctataaagtgtaacagaattactttcaactgcttggtaggacggaagtcttactcgagggagaagactcccatagctctaagcaatttagatactaaacgcgaaataacatccctcaggccacaagcctgagatgagggatattaacgcttgctgaactggaagcgcttgcgtgccttggggcgacctggcttcttacgctcgacgacacgagagtcgcgagtaaggaagccttctgcgcgcagggctggcttgtcttcttcgttgatcttgacgagagcacgagcgatcgcaagacgagctgcttcgctctgtcccttgaagcccccacccttgaggttgatcttgatgtcatacttctctacggcatccagagtagccaggggctggcgtacgatatactggaggatcgaagaggggaagtatgcagcgatatcacgcttgttgatcgtgatcttcccgctacctgctgctacatatacgcgggctactgcggccttacgacggccaatggcattgatgaattccatacgtcctggtatatattacttgagcttggagagatcgacgagacgaggctgctgtgcttcgtgcttgtgctctgcgccatcatagacgtagaggttagccaggatagcagcaccgagacggttcttggggagcatacccttgacgaccttgcggaagaggcggtcagaacccttagcctgcaggaagcgggggctgaactgacgctgcccaccggggtagccagagaacttaagatagacgcggtcatcccacttcttaccagtgaggactaccttgtcggcgttgattacgatcacgttgtccccgcagtctacgtggggcgtgaagttgggcttgtacttaccgcgaaggagcttagcgatcttggagcatacacgacccaagctctctcctgctgcgtccacgacgacccactccttggagacggtcgccttgttggcagagacggtcttgaaacttaaagtgtccattccttctgtcttgttgttaatgattcgacgaatagcgattctacttatagcgacaggtcttctcgtggccttaccctataactatgggacacaggcaaagcgcacactactctcccagtactgggcgataagactctgtcgatcctcatagactcgctgggtactatttgataaacagcgcacaaagatacaaaaaaacaagagacgccgtgcacctctcccccatcccgccataaagatgcggcaatcccgccctcgggcaagcaactcccctcctccccactgctgctggggtgacctatataggtagaaaaacgaaccagtactggtcactcatccgaccagtactggttgacaatagcgacctatactgcttcgcgctgcgaccaatactggtcggatgagtgaccagtagtggttcaaattgcccctccgagagcctccctctatctccctataaataaaccccatacgcaccgccgaaaatgtggctactttcccccgaaaaagaagctcccatcagtataggcacaaaaaagccccgcccgcaggagcatggctcgtgcgggcggggcagatgttatagggaggagggcttagccagcgatgctgacgtcgccttcgaggtcgagaccagaggaggcagcgagtgcctgttcgtgttcgctcacaggcatgaccacgagacgcttgtactcacgcagacccgtaccggcggggatgaggtgaccacagatgacgttctccttgaggccttcgagcgtatcgaccttaccgttgatagcagcatcgttgaggaccttcgtcgtttcctggaaggaagcagccgacatgaagctctttgtctgcagagcagcgcgggtgatcccctggaggatctggcgagccgtcgcgggcttagcttcgcgaacctctacgatgcgcaggtcgcggcgcttcagctggctgttctcatcacgcagcttgcggagcgtgacgatctgacctgggctgagggtctcagagtcgccagcgtcgacgacgacgaccttaccccagaggcggtcgttctcatccatgacctcaagcttatcaacgacctgctgctcaaggaagagcgtatcccctggatcgaggatctctaccttgcgcatcatctggcggacgatgacctcgaagtgcttgtcgttgatcttcacaccctgcaggcggtagacgtcctggacttcgttgacgatgtattcctggacagccgtggggcccttgatctcgaggatatcggtaggcgtgatagcaccatcagagagaggcataccagcgtagaccgagtcaccttcctgcacgaggatctgcttagaggtaggtacgaggtacttacgctcagcgccgagcttggtggtgacgatgacctcacggttaccacgcttgaggctcttaccgaaggagacgacaccatcgacttctgctacgacagcagggttagatgggttacgtgcttcgaagagctccgtgacacgaggcagaccaccggtgatgtcaccagccttactcatcgagcgagggatcttagcgagcgtctccccgacgtggatctcggagtggttctcctggacgacgtgagcacctacagggaggttgtagctcttgaggaggttgccgttggcgtcctcgatatggatacctggtacgacgttacggtccttcgattcggtgatgatcatttccttcagacccgaagcttcgtcagactcgacgcggtaggtagagccttcgatgaggttatcgaagacgaccttacccgagacttcagagatgatgagggcgttgaaggggtcgaattcgaagagcgtctgacccttcttgacctcttcaccttcagcgaagaagagcttagcaccgtaaggcaccttgacagagcggaggacgatcttcgtattcttatcggagatcttcagctcggtcatgcggctgacgacgatgttgacgggcttgccaccatcttcggaagccacttcggcgacacgcaggtcatcgaaggtgacgataccatcgtacttagcagcgacactattgcgcgtagcgacgttcgaagctacccccccgacgtggaaggtacggagtgtcagctgtgtaccaggctcaccgatagactgagcagcgatgaccccgacgacctcacccttctggacgaggatgttcgtagcgaggttacggccgtagcacttagcgcagacacccttcttagactcacaggtgagtaccgagcggatctcgacctgctcgatgggcgatgcctggatgcgctcagcagcagcttcgcggatctcttcgccagcgtggacgaggacttcacccgtagaaggatggatcacgtcgtgtacagagacacgaccgaggatgcgctcatagagggtagctactacttcgtcgtcgttgtcttccttcgtgagctcagtagccacgagaccacggagcgtaccacagtcttcttcggtgacgatgacatcctgcgagacgtctacgagacgacgcgtgaggtaaccagcgtcagccgtcttcagagccgtatcggcaagacccttacgagcaccgtgggtagagatgaagtactcaagcacggagagaccctccttgaagttcgagagaattgggttctcaatgatctgtccaccctcgctaccgctcttctgaggcttagccatcagaccacggataccagagagctgacggatctgttccttcgaaccacgagcaccagagtccatcatcatgaagacggagttgaagccctggttgtcttcgctcaggtgcttcatcaggatacccgtgagctggctattgacgtgcgtccacgtgtcgatgatctgattgtagcgctcgttgttcgtaatgaacccgccgctatagttcatcataatctcttcgacagcttcgtaaccctcagcgatgagcttagccttctcttcggggatgatgacgtcaccgaggttgaaggagagaccgcccttgaaggccatatagtacccgaggttcttgatatcatcgaggaactgtgccgtgatagccacaccgcagaccttgatcacgcggccgatgatatcacgcaggctcttcttaccgaggacttcgttgacgtagcccacttccttaggtacgtactcgttgacgagcagacgacccatagaggtgtcgaccatatgacggatgggttcgccatccttgacgtcgtcgacatagaccttgataggagcgtggaggtcgatcttaccttcgttataagcgatggtagcttcctcgacaccgtagaaggtgtagccgtcacccttagcacctggacggagcttggtgatgtagtacagaccgagcaccatgtcctgcgaaggaacggtgataggcgcaccattggcggggttgagaatattgtgcgaagcgagcatgagcatctgcgcttcgagaatagcttcgttgccgagagggaggtggacagccatctggtcaccgtcgaagtccgcgttgaaggcggtacaggacagcggatggagctgaatagccttaccctcgatcatcttaggctggaaggcctggataccgagacggtgaagtgtaggagcacggttcaggaggacgggatggcccttcatgacgtgctcgaggatatcccatacgacaggatccttgcggtctacgatcttcttagcgctcttaaccgtcttgacgataccgcgctcgatgagcttacggatgacgaagggcttatagagctcagcagccatgtacttaggcagaccgcactcgtgcatcttcagctcagggccgacgacgatgaccgaacgggcagagtagtcgacacgcttaccgaggaggttctgacggaagcgaccctgcttacccttgaggctatcggagagggacttgagcggacggttattgtcggagcgtacagcgcttgacttacgtgagttgtcgaagagtgagtcgacagcctcctggagcatacgcttttcgttgcgcaggatgacctcaggagccttgatctcgatcatacgcttcagacgattgttacggatgatcacacgacgatagaggtcgttgaggtcagatgtagcgaagcgtcccccatcgagaggtacgagcggacggagatcgggtgggatgacgggcagcaccttcatgatcatccactcggggcggttgacattcttggaggcgcggaagctctctacgacctgaaggcgcttgagggcttcgttcttacgctgctgtgagccgtcggtgctggcgcggtggcgcagctcgtaggacagggcatcgaggtcgaggcgagcgagcatgtcgtagatcgcctcagcacccgtcttacagatgaacttatcaggatcggagtcttcgagctgggcattacctggatattcttgatcgaggtaatcaaggtagtcgaggtactgctcttcggtgaagacgggattgggatccttatcgagcgacttagcggcggtctccttcgtcaggtcatcgttgatgcgagactggagcacaccaccctggatgaggacgtagcgctcgtagtagatgatagactcgagcttcttggtagagagaccaaggaggtagcccatcttgttggggagtgagcggaagtaccagacgtgtgcgatgggcacctcaagcttgatatgccccatacgctcacggcgtaccttcttctccgtgacctcgacaccgcatcgatcacagacgataccacgatagcggatacgcttgtacttaccacagtggcactcgaagtccttgacgggaccgaagatgcgctcgcagaagagcccatcacgctcgggcttgtaggtacggtagttgacggtctcgggcttcagcacttcaccactggagttctctaagatctcctcgggggaggcaagagaaatccggatctgtgagaagttgctctttatcttattgtctttcttgaaagccataatagaaagggaaataatgcggatcttattcgagggagaagcttagacctaagcccttaagctcgttgagcagtacgttgagcgactcagggataccaggcgtaggcataggatcacccttgacgatcgcttcgtaagccttagagcgcccgtggacgtcgtcagacttgatggtgaggatctcctggaggatgtgcgaagcaccgaaggcttcgagagcccagacttccatctccccgaagcgctgaccaccgtgctgagccttaccaccgagtggctgctgcgtgatgagcgagtaaggaccgatggagcgagcgtgcatcttgtcatcgaccatgtgaccgagcttgaggaagtaggtcacaccgaccgtagcgggctggtcgaactgctcacccgtaccaccgtcgaagaggtaggtcttaccgttgcggggaagcccagccttgtccgtccaagcgtgcatatcatcgagcgaagcaccgtcgaagataggcgtagcgaacttgcagtcaagacgacgtccagcccaagctaggacagcctcgaagatctgaccgaggttcattcgcgaaggcacaccgagggggttcagacagaggtcgacaggcgtaccatctgcgaggaagggcatatcctcctggcggacgaccttagagacgatacccttgttaccgtgacgacctgccatcttatcaccgacctggatcttacgcttcttagcgatgtagaccttggccatctggatgataccagagggcagttcatcacccatggtctcgtcgagcttcttacggcggagatccgactcgtattccttagacttcttgagatagttggagatcacctccgtgatgagcttatccgtgtgctcgttgcccgtccaacccgagaagatgatctcgttgtagttcagagcctcgagctcagtgcgagtgaacttagcacccttgcgaatcttctcaacaccgaggaagtccttcacgctgttcttacaggtcttgcctgaggtcagcttgaagagcttgtcgatgaagagctcacggagctcagcctgcttgcgctctgccttctcttcgagggcaaggacagcatccttcagctcggagcgattcttcttagcagccttagagtagagcttcgtatcgacgatgacaccacgcagtgagggcgtagccttgagtgaagcatccttcacgtcaccagccttatcaccgaagatagcacggaggagcttttcttctggcgtgggatccgactcacccttaggcgtgatcttaccgatcaggatatcacctggctcgacgcgagccccgacacggatgataccgttctcatcgaggttcttcgtagcgtcgtcgctgacgttggggatatcgctggtaagttcttcgagaccgcgcttcgtctcacgtacctcgagcgtatactcgtcgacgtggacagaggtgaagaagtcttcgcggacaaggcgttcgttcagcacgatagcatcctcatagttgtagcccttccaaggcatataagcgacctggacgttacgaccgagagcgagttcaccggcctgggtagagtacccttcggtgaggacatcaccagcctcgacacgctgacccttgaagcagataggacgaaggtcgatcgtggtgctctggttcgtcttgcggaacttaggcaggctgtaggtcgtgataggatcttcgaagcttacgaagagctcgtcatccgtgcggtcgtagcggatcttgatagaggtagcgtcgacgaagactacttcaccagcgcgctctgctacgatctgcgtacgagagtcacgtaccagctgagcctcgatacccgtaccgacgataggagcttcgggacggaggagaggtacagcctgacgcatcatgttcgatcccatgagcgcacggttagcatcgtcgtgctccaggaagggaatgagcgaagcagcgatagaggcgatctgcgtaggcgcaacgtccatcagctgaacttcagcgggcgtcacgacagggaagtcagcctccttacgtgccttaatagcgtcgcggaggaagttaccttcatcatccagaggagcattcccctgagctacgatgaggtcttcttcttcctcagcggtatagtacttcagagcctcatcagagaagtcaaccttcccattctcgacgctacgataaggcgtcgtgatgaagccgaggtcattgatcttcgcatagacacagagcgaagagatcagaccgatgtttggcccttcaggtgtctcaataggacagaggcgaccgtagtgggtatagtgtacgtcacggacctcgaagccggcacgctcacgagagagaccgccaggaccgagagccgagagacggcgcttgtgcgtgatttcggccagagggttcgtctggtccatgaactgcgacagcgcgttcgtaccgaagaatgagttgacgaccgaggagagcgccttagcgttgatcagatccgtgggcacgaagacttcgttgtcacggacgttcatacgctcacggacggtacgggccatacgagccagaccgacaccgaactgattgtagagctgctcaccgacggtacgtacacgacggttcgagaggtggtcgatatcgtcgacgacctccttagagttgacaagcccgatgaggtacttgatgatggccacgatatcctcgttggtcagtacgcgtacctcgggatcgatgtccagaccgagcttcttgttgatacgatagcgccctacttcaccgaggtcatagcgcttgtcggagaagaagaggttagagaggacttcacgagcgttggcctcatcggcagggtctgcattacgcagctgacgatagatatagtagagggcatcgtgctcggagttacaggggtccttctgcagggtattaaagatcagcgtgaagtcaagagaatcctcggtcttctccttgtggaggaggatcgtcttattgctcgactcgaggatcaggtcgatgttgtcttcagtgatctctgcctcacgctctacgaggacggtgatacgctccatggagacgacttcacccgtatcctcatcgctgaggtcatcgatataagtcttggtgacgcggccggcaaggcggcgaccgatgtgcttctcaaggttagcgcgcgtgaccttcacctcttcggagagatcgaagagatctaggatctgcttatccgactcaaagccaatagcacgcagcagggtcgtcacagggagcttcttcttacggtcgatgtaggcatacatgacattgttgatgtccgtagcgaactcgatccaagagcccttgaaaggaatgatacgtgccgagtagagctgcgagccgttggtgtgcgtgctcgtgccaaagaacaccccgggagaacggtggagctgcgagacgacgacgcgctcagctccattgatgacaaacgtacccgactccgtcatgtaagggatgtagcccaggaagacatcctgcactacagtgctgaagtcctcgtggtcggggtcggtacaagacagcttcagcttcgccttgagggggacgctataggtcagacctcggctcaggcattcctcgatagtgtacttaggaggatcgacatagtaatcgagaaattcgagaacgaagttattacgcgtatcagcgatagggaagttctcattgaagactcgatataggccctcagacttacggctctccgtagcggtgtcgagctggaagaagtcacggaaggacttcagctgcacctctaagaagtctgggaagacgagagggttctttatcgaagcaaagttgattctccctgattttggattggaagccatctattgattctttgagtgaaaggggggttcgggaatgtttagacacgaaatggttaagacccccctcgtcgggggatcttaaccataatcacctgattagaggtgctataggtgggcttacttaagttctacttcagcaccagcttcttcaagagccttcttgagagcttctgcagtagccttgtctacgccttccttaacaggagcgggagcagcgtctacgatgtccttagcttccttgagcccgaggccgcagtgttccttaacagcctttactacctggagcttagcagcgccagcgctcttgaggataacgtcgaaggagctcttttcttcttcctgagcgccttcagcggggccagctacgacaacagctgcagctgctggttcgattccgtactcgtccttaaggatagctgcgagttcgcttacttcctttaccgtcaggtttacaagctgttcggcaattgctttgatatctgccatgtcgattagttatttcgttgttgttgtttttgtttgtgggatagttaggactcctcttattcagcagcagcttcagtagcttcgccttcgcccttgttttcaagagcagagatgacgttgcgaatgggagactggaggagagcgacgacgtctgcgataagctcttccttgctcttgatagcgacaagttcagcgagctggtcagcgccatagaagcccgtctcagcataagcagccttgaggcggagcttggactcttccttcttgtccttagcgaagtccttgatgatcttagcgggggcgttagctaccgtggtgaacatgatagcggtgttccccttgagggctgagtagattgcagcgaagtctgtttcggactcggagagagcgcggcgaagcagggtgttcttagctactaccagacggataccccccttgttacaagcacgacggagctgggcggtcttagcggcgtccaggccttcgatgttggtcaggtagaagtgtgggtactcgttgaggtagcccttgagctgctctacgacggtgcctttattttcctttctcatgatttcttcctctgttattattcttctactgacttaggatcgatcttgatacttgggctcatcgtgctggagaggtagatgctcttgacatacgtacccttagcagcagatggcttgaggcggaggagcgtcgtgatgatctcgttagcgttgtcgtagatctgatcagccgagaaggagaccttaccgatagaggtatggacgatccccgtcttgtcgaccttgaagtcgatcttaccagacttcacttccttgacagcagcagcgatgtcgttagttaccgtaccgctcttagggtttggcatgaggccacgaggaccgagtacacgacccagagccccgatcttacccatgatagcaggcatggtgatgatgacgtcgatatcagtccagccaccgcggatcttctcgatgtactcatcgaggccgacatagtcagcaccagcagcctgggcttcagcttccttatcaggagtacagagcgcaagcacacgtacctgcttccccgtaccgtgggggagggtaacgacgccacgaaccatctgatttgccttgcgaggatcgacgccgaggcgaacatccacatcaacagaagcatcgaacttggtatcggtgatttcctttaccagcgcagaagcttcgcggagtgaatagatcttcccgggctcgatcttgctaaaagcgatcttttgctttttcgtaagtttactcatctttctattgattagttaccgggaaattcgccctttacagtgatacccatactgcgagccgtgccagcgacgatcttcatcgcagcttcgacggtgaagcagttcaggtcgacaatcttatcctgtgcaatcgcgcggacctgttcccacgtcagttcagccaccttattacggttaggctgtgcagagccactcttgagctttgctacttccttgagctgtacagcgacgggaggggtcttgacgatgaaatcaaaagacttgtcagcatagtaagtgatcactacggggaggaccttaccagcctggtcttgagttctggcattgaattgcttgcaaaactccattatattgatccccttggcaccaagagcaggtcccacgggaggtgaggggtttgcagccccacctttaatttgcaattttagttgtccagcaacttccttagccattgtcttgaatcttaagtgttacacactagaacgtgagaaggagcacctgcgtaaccagcttactccttgaccacttgcgaataattgagctccagcggagtcttacgtccaaacatcttcaccatcacgcgaagcttctgcttctcgggggttacctcttcgacggtagcctcgtagttagcgaaagcaccatcgatgatacgtaccacgtcgcccacgtagagctcgaggtcgtacaccccttcggagtcagccatctggtctgcacgaccgaggatgcgctccacttcacttctcttgagcggctcgggttctccacccttgttcgctccgaggaagccgatgacgttaggcatattgcgcagggtgtgggctacatcgccgagcaatgcggcctccacgagcacatagcctgggaggtaaggacgctccttgatgaccttcttaccagcacgctgggtcacgatcttctctgtggggatgaccacctgggagacatactgaccaagattagtattcttcatctcagcctccagctgctcacgcaccttggcctccttaccgctaacggctcggagcacatagaatctcttttctgttacttcagtcatgatgggaagggtctcagcgaagcttaggctccgatacggctatacacaaaaccaaggatggtctcaaaagtcttgtccatccctaaaacgaccagagcgatgatgagggaagcaaccatcaccaccacggcactattggtgagctctgaacttgacggccaggacaccttctgtgtaagctcgacatacgaggcgctgaacgcacctcctatcttcttaatgaaactcattatcgttttctatttagcacgggttgagagactcgaactcccgacacctggttttggagaccagtgctctaccaactgagctaaacccgtagaagaagggacagacgggacgaggcgcctcgtctgtcccttactttgaggactatctgatgattagtcgaggatttcggtgatctgacccgaacctaccgtacggccaccttcacggatagcgaagcgaagacctacgttgcaagctactgggtagatgagttcgacggtgatctcaacgttgtcaccaggcatcaccatttctacaccttcggggagagtgatctcaccagttacgtcaagcgtacggatatagaactgaggacgatacttgttgtggaaaggagtgtggcgaccaccttcttccttcttcaggacgtagacagaagccttgaagcgagagtggggctttacctgaccaggcttagcgatgaccataccacgcttgatttcgttcttgtcgataccacggaggaggagaccgacattgtcaccagcctgaccttcgtcgaggatcttgcggaacatttcaacacccgtgacaacggacttgagaccttctgcaccgagaccgatgatctgaacttcatcacccgtgtggataacacccgtttcgatacgacccgtagctaccgtaccacgacccgtgatagagaacacgtcttcgacaggcatgaggaagggcttatcgatgtcacgtggaggcagtgggatccaggtgtcaacagcatccatcagttccatgaccttatcttcccactgagcttccccgttgagggcaccgagggcagaaccacggataacaggagtgttgtcgccgtcgaattcgtagctggagaggagctcgcgcatatccatttctacgagttcgagcatttcttcgtcgtcaaccatgtcgcacttgttcatgaagatgacgagacgaggaacgtttacctgacgagccagaagtacgtgctcacgcgtctggggcataggaccatccgtagcagcaactacgatgatagcaccgtccatctgagcagcgcccgtgaccatgttcttcacatagtcagcgtgacctgggcagtcaacgtgagcgtagtgacggttagccgtctcgtactcaacgtgtgaggtgttgatcgtgataccacgttccttttcttcaggagcattgtcgatggagtcgaaagaacggagttcagagagccccttcttagcaagcaccgtcgtgattgctgcggtaagggtcgtcttaccgtggtcgacgtgaccgatcgtaccaatgtttacgtgtggtttcgatctgttaaatgtttctttagccataactaaaattatctattcttaagaaatacttcgttgtattctaagtgcgtatcactacgtcgactccaacgagagccgatgccgggacttgaacccgggacctcttccttaccaaggaagtgctctaccgctgagctacattggcttgttatctacgagtgcgaagaagacgcctcttctcctcattcagcagggcttacgggataagtatccctgctaattcggttgcaaatatacgcactttcttgaatataccaaaacacgccccgcgatgcgatagattttagggctccctccggtcaccccacccaaagccggcctcctctatatagtataatgaacgcgcgcgtataagaggaggaagagatgactcagcaggcaggaagccctatccgctacctgcctatagagaaggactatcggcaggcagaaaaacgaaccagtactggtcgacgatcggaccagtactgctcacaaagcgaaccagtactggtcacatagagcaacctatactggtcaactcagcgaccagtactggtcgcatcaccccacacacaagagtcactcttctccccgtagcatacgacactctgccgactggccattagcggggaaatagcgccttttccctaactttgccagcgacagtacagaaagaaaaatcccgcatacaatgatagcttaccttcgcggagcctacacggagctcacccccaccgccgtcctcgtcgagtgcgcaggcgtgggctactccgtggccatctccttgaccacctataccgccctctctggacagaaggagggcaagatcctcatcaccgagatcatccgcgaggatgctcatctactctacggcttcgccacgacggctgagcaagatctcttccgccacctgatgaccgtctcgggtgtcgggccgaataccgcccgtatcatcctcagctcttaccccccgcacgagctgacgagcatcatcacgctcgggcagatcgagcctctcaaggcgatcaaggggattggcctgaagaccgcacagcgcatcctcgtcgacctacgcggcaagctccccgctctcgagggagatgccagtcctgcgacgaccatccccacgacgacctcccgtggcaagaaggtacagccactggacaccaccaccccgcaggaagccgtcagcgccctgaagatgctgggctatcccgaagcctccgcacaaaaggtcgtacgcgagctcatcgcctctgacccgaccatcagcgtcgagggactcatcaagcagagcctcaagctcctctaaagcacgtgtgtacgtggcgggtcacaaggcacatccgacgcctgctgggaagcctccttctcggcacggccgccccccttgtcctcgccgcccaactccccatactccccaccacagctgacagcatctccccgcgaggggcgatgcctgccctcgctacaccccttctcgagacgcgcttcgtctatgagccgaagagtgagcgctacctgctgacgaccttcctcgacggcaagcccttcggtactcccctcccctataccttcgccgaatacctccgctaccagagcctccgtggtcaagggctccactgggacaacctcaacgctccgacgcgcagcagcacccagcggacgagcaagcccgtacgccgtggagtcatcgaccgcatcttcggccctggcggcctgcgtctcaaactccaggggcacgccgacctatcggctggggggaagaccgttcgctccgacaaccccgccctaccacagggcgcacgcaagcagacctacttcgacttcgaggagaagatccaggctggcgtgcaggcttcgctcgggacaaagttccagacggggctgaactacaacaccgcctcctcctttgacttcgacacgaagaagctccgcttagcctttgagggtgaggaggatgacatcatcaagctcatcgaggtggggagcgtctcgatgagccctcgcaatagtctcatcagcggcgggggcgccctcttcggcctgcataccaagctccagatgggacgtctcgaggccgatcttctcctgagccagcagcgcaccgagagccgtcgcgcctccagccgtgggggcgagcagaccgagcgcttcgagttctccgcctcgagctacgacgccctgcgccacttcttcctcggggacttcttccgcactcggtacgacggcgctctcaagagcttaccctacgtgcgctcctcgatacagatcacccgcatcgaggtatgggtgacgaaccgccgtgggcgcttcgacgatgcccgtgatgtcgcaggcttcgctgacctcggtgagccccagcacctaaacaacagcttcatccagctcaccagccccaccagtcccgtccccaccaacggtgcgaatagcctctactccacccttaccgtctccccctctcttcgccagctcagcaccctcagctcgggacttcccgccctacgccctgccctcgactacgagcgcatcgagagcgcacgacgccttgccccgagcgaatacaccctacacaacaccctcggctacctcagcctcacgacgccacttgccgccgacgaggcgctcgccgtagcctatgagttcacctacgaggggaaggtctaccgcgtgggggaattcgcagccgaccaatccgaaggcacctcctccctactcttcgtcaagctactcaagggcacggacttctcgccaaaggctccgacgtggccgctgatgatgcgcaatgcctatcgccttggcgcaggtatcaccgctctgcagcgtgcgggcttccagctcggcgtcgtctaccgcgatgatgccacgggacgcgccttgccctacctacctgatggcccgctgaagggcaagcaactcctcagcgtcctcggactggatcgccttgacgcccagcaggaggcacgcagtgacgggcacttcgacttcgtggagggctataccatacgctccagcgaagggctggtcttcttccccacgatagagcccttcggctcgacactcacgacggctctcggcgcagggagctggagtgaccgctatgccttccccgagctctacacgatgactgccgtcgaggccgcccagcactcggagaagaacaagtactacctgcggggcgaataccgtgccacctcagcgggagagatctcccttggcacggtgaacgtcgccccaggctcggtgcgtgtgacagctgctggcgcgctcctcaccgagggtacggactacaccgtcgactacaccgcagggcgcgtgaagatcctcaatcgccagctcatcgacgccaagacgcctatcgaggtgagcctccaaggcggtgacgccctcagccagcagcgcaagaccctcattggcctcgacctcaactaccgcttctctaaggacctccgcctcggtgccaccctgatgcacctctcggagatgcccctgacggcaaaggcagcactcgggcaagagagtatgcgcaatacgatgtggggcgccaatctcttctaccagacaaagtcgccccagctcacgcgcctactgaatcacctccccttcgtcgacctcacacagcccgcgtccttctccctctcggcagaggtggcgcagctcctccctggacactacaagagtaagtacagcgatggtagtagttacctcgatgacttcgacgcagcacataccgccatcgacctgatgagcccacaggcctggcgcttgtcctccacacccgcgacgctcgtccctgcgggaataggcgcgagtgactacctgcgctacggagagcgtagagcacgactcgcgtggttcaccatcgacccactcttcacccgtgagcgcagtgcctatacccccgcctatatacgtagcgacctcagcctcgtgagccgacatctggtgcgcgatatcccgacggcagagctttacccaaatcgtgaggtgaatgccagcctaccgagctatatccccaccttctcgctcagcttctaccccgaagagctcggcccgtacaacctcaatgcagcgagcctcacagccgacgggaagatcagcgatgcacgtgggagctgggcgggcatcatgcgcaagatcgaccagacggacttcgaggctgcgaacgtcgagtatgtggaattctggcttatggatccttatgccgacgagggcacgctccctgcagggagcggtggcgacctatgcatcaacctcggagatatctcggaggacatcctgcatgacgagcgccgcttctacgagagtggcctgccactcactcctcagccaggggctacgatctccactccttgggggatcgtgccgacacgcccgagtgcaggctatgccttcgacaatgcggcgggggcacgtgagaagcaggacgtcgggctgaatggcctgtcgtctgccgaagagcgccagcatccaagctacgcctccttcctcagcgccctacgcacccgcctctccagcacgaccctccagcgctggcaagacgacccacagagtccactccacgaccctgcaggcgatgacttccaccactaccgcggggcagactacgactccgagcgcctgccgatcctcgagcgctataagtacttcaacggctccgagggcaactcgtcggagcgtcttggaggcgatggctacagcaccgccgctaccgtgagccccgacaccgaggatgtcaacggcgactacagcatgaatgagctcgaccgctactatgagtggaagatctcactgcgccccgaggatctcgtcacgggccgtgggttcatcaccagcagccgcagagtcgaggcccagctccgtgatgggaggacttctcccgtgacgtggtatcagttcaaagtccctctctctgccttcaccagtcgtatcggtggcatcagcgatctgaggagcgtgcgcttcatgcgcctctacctcacgggcttcgatcgtgagacccagctgcgtttcgcctcgctacgcttggtgcgaggtgactggcgcacctacgaagggggccttgatgagggacagcccgcacccagtgcctccacccgcttctccgtcacgtcggtcaacatcgaggagcactccgaccgcactcccgtcagctatacactccccccaggcgtctctcgctcactcgacgcccagcgtgggcagagcctccagcagaatgagcaagccctctccctacgcctcgaggatctccccgcaggcgagagccgtggcgtctaccgccgtgtgcagtacgacctgcgtcgctaccgccgtctgcagctcttcgcccatgccgaggcactcctcggagacctcacagggctgggtgatggagatatgacgctcttcgtgcgtctcggctcggactacacccagcactactacgagtacagcctaccgctcacgctcactcccgcaggacgctacagcagcctcagccccagcgaccgccgtcgtgtatggcctgaggagaatagcatcgacctaagtttagaagacctcgtctccctcaagcggagccgtaacgcttcgctctccgcagggctcggtggcgcctcactctatcgccccttctcacgccccgacgccaagcaccccacccatacgctcaccgtcctcggcaatccctccctctccagcgtgcgggcgctggtcatcggcgtgcgcaatagcgcgggcctcacgcgcagtgtcgaggtctgggtcaatgagcttcgcgccagcgactaccacgaggaagcgggctgggcaggacagctacacagcacactccagctggcggagctgggcgaagccagcctaagagcccaatacgtctcggcaggcttcggtgctatcgatgccccgctgatgagccgcacactcgagagccgtcgtgctatccagttcgcctccacgcttgagctcggccagctcctccctcccgaggcgaaggtgaccctccccatctactacacggtgagcgacgaagtgctgacaccgcagtacaatccgctcgacgaagacgtgaagctcaccgatgccctcagcgacctctctacggagcgcgagcgcaaggagcttcgtgctcgcagcctcacacaccgccgcagccaaggccttgccctctcgaaggtcgccgtcggcatccgctccgaggagcctatgccctacgaccctgcgaacctctccttcagctacgggcacaacacctcctccgaagagactcccgacatcgagtacagccgtcacctcgactggcacgcagccctgcgctacgactatacgcctaccttccgcccgctacggccctttgccaaggcttcgggctccagcccgtgggcggacttcctccgtcagtacaccttcactccgtggcccagccgtctcgtcctcgagacctcgatggtgcgacgctacgatgaggagcagctccgtagcctcggcgatgagctgagcggcacacgcctccccgcgaccttcgcccagcagttcatctggaaccgccgtctgcagctcaactggaatcccatccgttcgctccagctggccttcaactccggcaccgacgcacgcatcgaagagccccacgtgcaggtcaatcgccagctccagcccgatgcgtggcgtgcgtggcgtgactccgtcgggcagagtatccgtgagggggggacacccgtccactacgcccagcaggcaagcctcagctatcagctccccactgccgacatcgcgcccctctccttcatccgctcacagctctcttatagcagcgcctattcgtgggaccgtggggcggtactccccgacccgaccatccgcctggcgcataccctcatggcgcagggcgcactcgagtccaccacgcagctccagctccgccagctctatcagcatatccccgcactcgctcggctggagcgccgcttcggcacggctggtatgaccaccagcgaagggcgcgggaagaaggcgaagggtgtgagcgacgggaacgagctcattgaccgcctcctctacgccctccttatggtgaaggacgtatcgctgacctaccgctccacacgcagtacgctcctccctggcttcctcccctccatccaggctatcgggggacaaggctcttcgggcggtgcgctctcccccggtgtgggctttgccttcgggcttagtgatgtggacttcatcgatcgccttgccgaacggggcgacctcctcatctcgaccgagcacctcactccaggggtcttcacccacacccgcacggtggacctacgtgctacgctccagcccctacgccacctcaccatcacgctctcgggcaatcatacccgcaccgaccgcaccgaggtacaatatatgtatgcgggtagcccccgactctacggcggggacttcacgatgacgaccatcggcctcaagggcttcttcgccccgctccgctccgaggagggctacctctccgagaccttcgccgagatgcttcgcctaagagagcccatcgctcgcaggcaggaggaggcaggtagcctcgccacagggctcaccatcgaccacaatgcttctgccgtccttatccccgccttccgcgcagcctatatgcacggctcggggaaggggcgcaaggggctgagtgccctgcccgacctcctcagcatgctcccgaactggtcggtgagctacacggggctctccgagctgcccttcctcaagcgccacttccgtagtgtgaccctacgccacacctaccgcgccacgtacaccgtcgggggcttctcctcgctggcaggctggcagggaagcgatcccgatgccatcggcctcctgagtgagacaactgcgggcggaggaggagcgatgagcagcgtgcgccttagctacgcctatgacatcccgtcggtagcactacaggagaacttcttccccctcatcgggcttgacctgacgtggctcaatggtctcgggacgagtgcgcagtggcgccaaagccgtggtgccgtcctgcacctcggggcgcgtagcctcatcgaagccatctcgcgtgagctaagcctcggcctcacgtacaagatcgacgacctcacgagcctcatcagccccaccaccgcccgccgtaagaagcgccgtgcgagcaaggagcctgcgacgacctctgcccacgggcttaccctccgaggcgaatatgcacaccgccgcacgctcaccctcctacgccgtcttgaggagggctacacccaagctacctcggggatcatcgaccgacgcctgcgcctcagcgccgaatatgagctgagccgacagctcggtctcgaggcgtactacgagtacagccgcaatgtaccactcgtcagcgcctactccttccccatctccacaagcagctacggcctctccctgcgcatcacgctcgacaactaaccgcccccctcacggctcgacataccaagcccgcacgaagtatactcctcggcatcttcgtgcgggcttttcgtatcgacggagcccccctactccagacgaggctacacgcaccgctacggggagggggttgcaacctatataggtcggcgggtcgaccaatattaggttgttgccccgcgtagggataaaagttgcggatgagtggtagataagtttggactacgtacgtggctctaatatctacgtacgtggatatttggatttacgcacctggtctttaagactacgtgcgtagacagaggaaaaccactacataaaggtgcttttttcttcacgagaaggatacttttccttccgctgaataagaggaatactcgcgataaggcgaagggcttgtgtatctcttcggagaggtatatcgtggagctgggcaggcgataccttagcactctactatggagagagtttgcacaatcaatgattggggtactctatatagtggagagattagctacttttgtgagcgtaatcacactctccccttgagaaaagcatgacctctgacaccaccccgctcatccccctgcgtaaggggatcgctggcgcccagtacctattcgttgccttcggagccacggtcctcgtacctatcctcgtcgggctcgacccatcgaccgccctcttctcggcaggtatcggcaccctcctcttccacctcgtgaccaagggcaaggtaccgatcttcctcggtagtagctttgccttcatcgcaccgatcatcaaagccacagagctctacggactcagcggcgcactcttcggctgtatcggggtgagtgccgtgtacttcgtgatgtcactcctgatccgtctcttcggcctgcgcttcatctcccgcctcttccctccagtcgtcatcggccctatcatcatgctcatcgggctctccctctcggactccgccgtgaagatggcagcgacgaactggcctctggcggtcatctcgctcgctacggcgatcatcgtcacactttacggccgagggatcacgaagctcatccccatcttcctcggtatcgtcgtgggctatatcgctgacctcatcttcttcgaggtcgatctaaggcccatcgccgaggcctcttggctgagcctccctaagatcacgctccccgagaacttctcctttgcccccatcctctttatgatccccgtggccatcgcccccgtcatcgagcatatcggtgacgtgtatgtggtgaataacgtggcagggaagaacttcgtcaaggaccccggcctgcaccgcacgatgctcggcgacggtatcgcctgtctcttcgcctcactcgtcggggggcctcctgtgacgacctactctgaggtcacgggggccatgtcactgacgaaggtaaccgaccccctggtcttccgtatcgcagccgtcacgggcgtgctcttctccctcatcgggaaggtcagcgccctcctacgtagtatcgaccaggctatcctcggtgggatcatgctcctgctcttcggcacgatcgctggcgcagggatctcgagcctcctgcatagccgtgtgaacctcgcctcgtcgcgcaacgtggtcatcatctccgtcaccctcaccacgggtatcgggggtgccgcactctccttcggcaacttctccctctcgggtatcggtctctcggctgtcatcgccgtcctgctgaacctactcctccccgagcgcaaggaggatcgcgaggagcctactacgaagcactaacttaactctcacaataatccatccatgcgacagctttatcgtatcgcgcttgtactcctcctgactaccctcggagcgcaagcacaaaacattcagctccactacgacttcgggcgccagctctacagcaaggaccagcccgagcgccccaagctcaccacgaccgtggagctcttccgccccgacagctgggggaataccttcttcttcgtcgatatgaactatcagcgcgagggcatcacctcggcctactgggagatctctcgtgagttcagtctcggcaagctccctctggccctgcatatcgagtacgatggcgggctgagcaatcagttctcctataagaatgcctacctcgcaggtctgacctacgcgtggaaccaagcagactatcaggcaggcttcaccttcacgccgatgtataagtatctggcacgtcaggatagaccccactccttccagctgacgagtacgtggtacctgcacatggcgggtggtaagctctccttcctgggcttcgctgacctctggggcgaccgtcatctcgtcacgggcaagaacaatatcatcttcatcaccgagccgcagctgtgggtgaacctgaataagttcgagggtatcaaccccaagttcaacctcagcatcggtaccgaatgggagatcagcagcaacttcgctgtactggacaagaccgtcgtaaaccccacgctggccatcaagtggaccttctaagcccccgcacactctaatgcaagcactctatcgtcttgtgggctttgaccccacgaagtacaagctccgcaccgagcttctggcaggcctgacgaccttcctcacgatgagctatatcctcgcggtcaatcccgacatcctcagcactacgggcatggacaagggcgccgtcttcaccgctaccgccctggcatcggccgtcggtacgctcctcatcgccttcttagctaagctgcccttcgcccaggctcccagcatgggtatcaatgccttcttcgccttcaccctcgtcatgggtatgggttacagctggcaagctggtctcgcagccgtcttcgtcgaaggggtcatcttcatcctgctcaccgccttcaatatccgtgagcagatcgtacgctgtatcccgaagaacctccgcttcgctatctcggcaggcatcggcttcttcatcgccttcatcgggctgaagaatgcaggcgtcatcgtcgccaacgaagctaccttcgtagccctcggccccttcactcctacggcgatcctcgccgtcatcggtatcatcctcagcggtgtcttgatgacgctgcgcgtacgcggggcactcttctacagcatcgtcctctgcacgatcatcggtatccctctcggtgtgacacagatccccgatagcttcatcccggtctccctaccccgctcactggcgcctacattcctgcagttcgacttcaaggcgctgctcaatatggatatggcgctcacgatcttcgctctggtcttcatggatatcttcaacaccgtgggtacgctcatcggtgctgctgctaagactgagatgatggacagcgaaggcaacgtgaagaacatcaagcaggcgatgatggctgatgctctggccacctccatcggtgccgtctgcggtacgtcgaccgtgacgaccttcgtagagagcggtgcaggtatcgccgagggcggccgcacgggtatgaccgcactgtctacagctgtgctcttcatcctcgcactcttcctctcgccgctcttcctgctcatcccctccgcagcgacgacgggtgctctcgtgctggtaggagtgctgatgctaagctctatccaggatatcgacctcatggatatctccgaggcactgcccagcttcatcaccgtactgacgatggtgctgacctacaatatcgccgaagggatggccctcgggctcatctcctacacgctggtcaagctcctcagcggacagtggcgccaggtctccatcaccctctacatcgtctcggcactcctcatcctgcgctacatcctcgctatataatagtagagcgcactccgagtgcccacaacgaagaaggcccctccccacgacttcacctgtcactggggaggggtcttcacacaatcctccgtgaggatacaagtcccttttacaaaagcgttgtatctttgcgttattaaataaatcattgttcgtagagcctatacggctcctcccaagcatatgccgctcgctgagatccacgctatacgctacatccgcgcctcgatacttacgctcctcctctgtctcgctcttgcacccctcgggatgcaagcccagcgcctcttcaccgtcgtcatcgacgccggtcatggggggaaggactcaggtaccgtagggaatggtggcaaggagaaggatatcaccctcgcggtggctaagctcgtcggggcgaagatccacgcagcgcaccccgaggtccgtgtactctacacgcgtagcacggacgtcttcgtcggtctgcaggcccgtgcagactttgccaataagaacaaggcctccctcatgctcagcatccacgtcaacagcgcaccgtcgaaggacgtccacggtacggagacctatgtactggggatagcgaagttcgccaacaacctcagcgtggcgatgcgtgagaacaaggcgatgctcctcgagagcaactataagacgacttacaagggctttgacccgacgtcgacggagagctatatcatgtttgaccttatgcaagatgcttacttcaacaagagcattgagctggcaaacaagatccagcgccagtaccgctccgctggacgctacagccgtggcgtacgtcaggacatactctgggtactgagtcagtcggctatgcccagcatcctcaccgagatcggcttcctctcgaatgccaacgaagccgccttcatgctcagcgaagcaggccagcagtcactcgcctcggccatcgcggcaggcttcagctcttactaccgtagctatcgcggcaagagcacgaagacccaggacagcaaggaggccgacagcaccgagacgaagaaggaagagaccgctactgttagcgacgagaccgccgaagagcctaccgcagacaaggagaccagtccccgtgcggaggtcgagcgtgcgatgaacaagagtcgtgagcgtagtaaggacaaggagaagaccaagaaggagagcgaggcgaagagctccgactcggagatgacgtaccgcgtccagttcctctccagccccgataagatcgacacgaaggatgcgcgcttccgcaagctccccaccgcagtagagcgagtgaaggtcgggcgcgcatacatctatctactcgctcccacgagctcgaaggccgaagcacagaagcagcttcgtgccctcccccgcacttaccgcgatgcctacatcgcacgctaccgaggcaagacacgtctctaagtccccctatcacagagcatatatagaaataagatacatatgaagataaagaaagaggtacagatcggcctgctggccatcgtcgctgttgccctcggctacatcggggtcaacttcctcaagggcatcgaagtctttaagaagacctcgatctattatgcccacttcgacaacctcagcggcatctctgcagcagctcccgtcgaagccagtggcttcaaggtgggcaacgtgcgctccgtagccttcgactacagccgtggctatggcgctacgctcgagctggcgcttgatgacgatatgcgcatccccgtagggagtcagctgaagatcaagtcgaatcctcttgggagcgctgagcttgtgctcgtcatcaatccccagagccagacctacctcagcgagggggacaccatcgccagccaagacgcaggcgacggactcctatcctccgtctctgagaagatcctccccgctatcgcagggatgatgcccacgatcaccaacacgctggagcgcctgaacgccctgctcaacgacaagagcatcgacagcatgctctatgggctcaatgcctctacacagcaactgcacggtatgatggctgggctgaaccgcacgagccgcagcctcggccctgtcctcgacaatgtcgggcatatgagctcgaaccttgcgaacttctcgggtcagctctcctcgatgcgccttgactcgctgatgctgagccttcagcagacgacggctcagctccagatggtatcccagcagctccgtggcaaggacaataccgcaggtcttctcctcaacgatccctcgctctacaaccgcctcgacagcctcgtaggcagtgcagaccgcctcatgcgtgacctgcaggagaaccccaagcgctacgtgcacttctccatcttctaagcccgcacgaccgacacgattaccatggagcgtctactcatcaccggagcctctggcttcatcggcagccacctcgtccgccaagctctcgaagcgggctacgaggtatgggccgctgtacgtaaggacagtgacaagacccgccttgagaagcaaggagtcaagctgcttgaagtcgactactatgatgaggatcagctcttcggcgctctcgactcggtccgtcccttagaggaaggcggtccccagtgggactacgtcatccacaatgcgggcatcacgaagaccgcccgcctcgaggagttcgcagaggtcaacgccgagcatacgcgccgactgctccatgcactcagccgtctctcgaagcagcccaagcgcttcgtcctgatgagtagccttagtagctacggcaatgtagctggccccgacgaagccctgcatgccgagctccctcagaagcccaatacccgctacggccgtagtaaatgcctcgcagagcactacaccgagcagtcgggtctccccttcacgatcctcctccccacaggcgtctatggcccaggagacaaggattacctcatcgcactacagagcatcgcccgtggcatcaatgcgatgtcaggcctgcgcaagcagtacctgaccttcgtctatggcggggatgttgcccgagctgccctctttgtactacgcgatgagcgtgcccgcggtcagcgctatatcgtagctgacggcgacacctataccgaccgagagttcggtcatctggctcagcgtctgctgggtcgcaagcacgtattccatatacgtatccccctgccactggtgcgcctcacctgcctcttcggctcgctccgagcagccatcacggggcagacgacgccactcaatcgggacaagtacccgatcctcgcacagcgcaactggcgctgcgatccctcaccactcttcgctctgggattcaccccaagcaagaaccttgaggaagggcttcgcgagaccatcgccgacgggcgctcccgcggtctcctcccttagtcatcgcccccgcatagccggctccactcaagagctggcaaacattgctcactttttaattgtgggaatgggggcttttgtgtatctttgcgcagatttttacgcatagtttaagagtcacccatgcataccgaccagtacaagatcaatctacggagtctcccggagggcgatcacgagtacacctggctcctcgaggacagctacttcgagcgcctatcggagggtagcgtacacggcggtgaggtcgatgtcgacctacgcctgcgccgtacgggagacgtctttagcttggacctctactatgagggctatgtggtggtcgactgtgatcgctgccttgacccagtagatatagatgtagagtccgagcgcgagcttatagtcaagttcggcaatgaagcccttgaggagaaggacgagatcctcgtcgtctctgagcaagatggggtgctcgacctggagtggatcctctatgaggatatcatcctgagccttcccctacagcgaatgcatctcgagggcgagtgcaacgaggagatgatgtcggcctatgcccgcgtctctaccgacgaagtgcgcgacgaagccgaaggccccgcccccaccctcgatgatgaggggatcgacgagcgctgggctgcactcaaggctctcaagcgagattagtaattaaaacaaaataagatttatggcacatcctaaaagaagacagtccaagacgcgtaccgctaagcgccgtactcatgataaggcagctatgcctacgctcgcaaagtgcgctaactgcggtgcatggcacatctaccacacggtatgtggtgagtgcggttactaccgcggtaagcttgccatcgagcaggcttaatagccccacttagccaacacaaagaaaagccccaaggtatcccctttggggctttttttgtaacttcgtgagcgacaagctaaggcgattgaaattaatctacatcagtatatccaactaacctatgagtatcatcaacgcagccatcacggctgtcggagggtatctccctgaagataagataaccaatgccgacctcgagaagatggtcgataccaacaacgagtggatcatgacccgtgtcgggatccgcgagcgtcgcatcctcaaggaccccacgaagggtgcttccttcctcggcatcgaagccgtcaaggatctcttctcccgcaacaacattgaccccgccaccatcgacgggatcatcttggctacgaatacggctgactaccacttccccacgacggcttctatcgtagcctttgagacgggctgtatcaacgcctttaccttcgacatgcaggctgcctgccccagcttcatctacgctctcgaagctggagctaactacatccgctcaggccgctacaagcgcatcatcgtgcttgccgctgagaagatgaccgccatcaccgactacaccgaccgcgctacgtgcccgctcttcggcgacggcgctgcttgcgtactcctcgagcctactgaggagaacgaaggtgtactcgactcttacttccgcacggatggtacgggtcgcaccaacctcattatgaagtccggtggctcggccagcccagcctcccacgagacggttgatcgccgtgagcactacgtctaccaggaaggtgctgccgtcttcaagcaggccgtcaagggcatgtcctccagctgccgcaccatcatggagcgcaacgggctcagctatgacgacatcgcttgggtcgttccccaccaggctaacctccgtatcatcgacgctgtagcgcgtgagatgcaggtacctctggagcgcgtgatggtcaacatcgagtaccgaggcaacaccagctcagctacgatccccctctgcatctgggagttcgagaagcagctcaagaagggtgacaacctcatcctcacgtccttcggcgcaggcttcacctggggtgcagtctacgtcaagtgggcttacgatcccaagaactaatctccccatacgatagaccttgcctgccactcttcccttcgctgggagaggacgggcaaggtctttcattcctacccctccatactccggacgatggaagaaaagcaagaagtcacgcaccgctcgggcttcgtcaatatcgtgggcaaccccaacgtggggaagtccaccctaatgaacctcctggtcggcgagcgcgtatcgatcattacctccaaggcccagacgacgcgtcaccgcatcatgggcatcgtcaatacccccgagctgcagatcgtctacagcgacacccctggggtactgcgcccgaactacaagctccaggagagcatgctcgagttctccgagtcggctctcggtgatgcagacgtcctactctacgtcaccgacacggtcgagacggccgataagaatgagttcttcctcgagcgcgtccgtggggtcaagtgccccgtactcctccttattaataaggtagacctcacgacccaggagaagctcgtcgagctcgtggagcgctggcacaaggagcttcctcaggcggagatcatccccatctctgcgctcaacaacttcaatgtccagcccttgaagaagcgcatcgagagcctcatccccccctctcctccctacttcgagaaggacgcactgaccgaccgccccgcgcgcttcttcgtcaccgagatcatccgtgagaaggtcctcctctactataagaaggagatcccctactccgtcgaagtcgtcgtcgaatccttcaaggaagaggacgagcgcatccacatccaggccctcatcgtcgtcgagcgcgacagccagaagggcatcatcatcggccaccgcggtgtcgccatcaagaaggtcggcacgatggcacgtcgcgatatggagcgattcttcgagaagaagatcttcctcgagctctttgtcaaggtagagaaggactggcgcaatcgcgacaagatcctccgcgcctacggctaccgcctcgactaagagcggtaagcctcacccaccaatcacagcatcagatatgagtcatttagtagcaatagtagggcgccccaacgtagggaagtccaccctcttcaaccgcttgacgcagacccgcggggccatcgtcagcgaagaggcaggtacgacccgtgaccgccagtacggcaaggtatcatggctcgaccgcgagttctccatcgtcgacaccggcggttgggtagtaggtagcgaagatatcttcgaaggcaagatcaacaagcaagtggagatcgctatggaggaagccgatgtcatcctcttcgtcgtcgacgttgagagcggcatcaccgacctcgatgatgaggtcgctgccaagcttcgccgcacgaagaagcccgtcctcctcgtagcaaacaaggcggacaactttgcccagcactacgaggcagctgagttctacagcttcggcctcggtgatcctatgcctatctccgctgtcagcggtagtggtacgggtgacctcctcgatgccataacgaagaacctccccgaaggcgaatacgtcgatgagactcttgatgctccacgtatcgctatcgtcggccgacccaatgcgggtaagtcttcgctcgtcaatgccttcatcggtgaggagcgcaacatcgtcacgaacgtagcaggcaccacgcgtgactcgatctacacgcactacacgaagttcggcatgaacttctatctcgtcgataccgctggtatccgcaagcgtggcaaggtcaacgaagatctcgagtactactcggtcattcgctccatccgcgctatcgagaactccgacgtatgtatccttatgctcgacgccacccgcggtattgagagccaggaccttaatatcttctcgctcatccagaagaatagcaaggggctcatcgtctgcgtgaataagtgggacctcgtcgaggacaagagcaatgccgtcatcaagacctttgagaacgctatccgcgagcgactcgcccccttcaccgacttccccatcatcttcatatcggctctgactaagcagcgtatcttcaaggtcctcgaggaagtccagcaggtctacgagcgtcgcagcaagcgcatccccacctcgaagctcaacgaggtcatgctccccatcatcgaggccacgcctcctcctgccaccaagggcaagtacatcaagatcaagtacgtcatgcagctccccaccgcggtgcccagcttcgccttcttcgcgaaccttccccagtgggtcaaggagccttatcgccgcttcctcgagaatcagatccgtgcgcactgggacttctccggtacgcccatcaacatcttcattcgcgagaagtagcctcccttctcccccgcccaacgaagcgccccagccggtagtccacctaccgactggggcgcttgcttttccctccttccgcacctcgctccgcgaagcactatacgagggtgatacgaaccactactggtcaccgctccgaccactactggtccgtgagtgaaccactactggtcagcgagtgaaccactattggtcagcgagtgaaccactattggttcatagtgcaaacctatattggttcgctcacggacctatataggttcacctgcggagcaatactacgcggcgtcctctcgcatgtccaacaactcaatctccaaactctaatcaacaagtatctaaagcaatacgtcatagatcaaaagctatgatcggagagacacacgtctatgcatttttaagaggacacacctacccaagacctactaaaaagaggacattccttttattagactcctacaaaaaaagaaccctattttggcaataaagattaaatcaatacctttgacaagacatctttcgttacaatagaattaagctagccacaagcaatcgaactacacaaactatgcagcaagcacaaaacactacttccgaaacaggggagatgccactcaagaatgtacgtgacctcctaggaaagaactattacatacccaactaccagaggggatatcgttggggtaaggatgaagtaactaagctcttagatgatatttgggactttgccaatcataggaagtctcaattctattgcttacagccccttatcatcctgccacaagagccaagcgatgcagaggaaactgtacggtatgaggtacttgatggtcagcagaggttgactacgcttaatctcatcgtccactatatcaaggagcatttccctggaaacgagaagtatccagagatgtacctacactatcagacccgccctgagagcagtaaggctttttcttcgatttgtattggagaggatggtcgggtacggatggaagatggtttaaaacctagtattgacttttggcacatcaagcatgcctatgggcatatccatagctggtttagcgaaaaggaagaggatgaccgatttaatggtaataccttccaagaagtcttccttgatcaggtgaaagtcatttggtacgagatagacaggggcgaagatcctataaaggtctttgagcgtaataatataggtaagataccgctagctgatgcagagctcatcaaggccttcatactcaaaggagataagagatctgatcgcaatcatctgcgccgacagctggagatagctcgagagtgggatgagatagagcaaggactacgtaatcccaatctatgggcatttatctttggtaataagcctatgcctgatatctgtatcggacaactctttgtcgtagcactaaagcttgaagacgagaagaagcctaaggtctatgatatagtagaaaaaaaactcgaggagaaagaaggttatctcgagagtttatggcagcgtgtgaaggatctatacagcatgatagtagattggtaccatgatcataaggcctatcactacatcggctatctcacccagatgggcgtaaaggtacagagtatatatgccttaagaagtgaggatgataccaaggctcagtttatcgataagctccgaagcaagattagtgaaggtgagattcgaaagctccattactctcaaaaagatggcttttacaagctaagcaaaagagagaaaagcaaagagctatatggtggtaaagaggtgcgttcgctactcctgctctacaatatagagctgtgcctacgtgaaggtagtaccgagcgattcccatttgagaccctccaggtcgaaggagagaaacgcatcatgtgggatatagagcatattgactctcagactccaagggaaattcagtctaagaaagaacagaatcaatggcttgaggttacaagagaagctcttggatctaagattgatgagacgttaggagagagtatagaaaagtatatagctcaagaattgaatgaacaagagaagttcgaagcgcttagagaacaactgcaagaccttgctggagaaaaagaagataactatagccagtctattggtaaccttgccctcttagatgcggagacgaatcgaagttatggtaatagcctctttataaagaagagggcagagcttcagaagcgagaacagcagggaaagttcattcctcagggtacgaagattgcctttatgaagtattttcctggaagcagaccagcactcgataagtggagtacagaggataagtgcgcacatgaagcctatatatacgatttggtaaaagactatatcaagaacaaataatatgatagccaatcattctctacgagagtttctcgataagtacgcagctgtagaaatacccatactacagcgagactatgcgcaaggccgcttagatcccagaacaaaggggatgaatagaaaaggggagaacttcataagagtgctcttcaatgctctgcgtgaggagaaggggcttcatatggatatcatatatggctcgatagaaacccgagatgatgaccatccagaagaaaaaaccttcattcctctcgatggacagcagcgcctgaccacgttatggctattgcattggtatctctctcagtgggaggagaggagtgaagagattgcccccctactccagagattcacttatgctacacgtagtacagcacgagacttctgccagcgactttgttccttgagactgacgcgggatgaattagctaatccctcggagtatttctccgagaagatgtggtttacgagcaagtacagctatgatcctacgatacaggctatgctcaatatgctcaacgccatagctcaggaacagaaggaacaccccatatcctttgatcagctggagagcttgcagttccgtagctttgatattggtgcttatgagctgactgatgagctatatatcaagatgaatcgccgtggaaagcaactggagagtatagagaatcttaaggctgactttgtgggctacctcaagaagatagggcatgactttagcaagcccgatagttatgaccgtaagctcgatcatgagtgggctgatatggcttggggatgtcgggagaatgaggattttgatatccgatatctacgactcttcaatagatacttctacaacctatggatcatagataatcctcctggggagaaggagaaaaattcaactcccaatgagctgaatgtacacttcacagggacggactatcaaggctttgatgcttatgaagccatactctctgcggaggatggtcgtctagggcgtatggtgcgtttcttcaacttcttagctagtgatagaggtattatctacagtgattaccttcgtaacccatggagagataagaataaggaacaggattcagcctatccctatctgctagatgtagtgaaactctctatgctcgatcgaatagctctctatgctctgatgctttatgtagataatgcatcggatgaggttctccagagcctcgagcactatcaagcatggatgaggatcgtatggaatctgattgctgaccctaagctacgtagctatcaggctcagaggcgctatatgcttctacttgctcaactcgcccctcatagcacgactatagagagtttcctgatcagtactgatatagagaagataggtattagttccacaggagatgaaaaagctcgattaaaactggagcaggataagttacgctacataggacgctatcctaatcgacgagaggctttgcttagggctgagtgtatcccttgtttgcagggacaggtaggattcttacttggaatagagggggatgatgatcatttctcaaagattgtagagcttacagaaaagaatgtcagggcagattgggattggggggctgagtatttatggcctgctctaattagccttctagaaaggcctctctttaatctatcctctgagggtaagtttgattacctatcccataaggaacatggctcaggtataccttggcgcctgcaggatctacttaatcgtcctcatattactgaggccctactaagtctctttgaacgatgcctacaggatgagggtagaaagtttacagaagtctgtgaggagctctgtcaatcctatgagtatgatgagaagataccttggcattatcctcttgtcacgagcaatatcttactcaaagcagagcagggacgtatctataatcgctactggggtgaaggtatttgcctacagaagaggtggagagtgacagagaataaatggtgtgggtattggcgcttaaccgaaagggaacctgtaatgaggactaaaaaggatgtcttttaatatagacctcatttttatgggtaaggacaatgccagtctatagaccgttcaaactccgccttaaagaggataagtctaaacaacataatttatagcgaggggtggaccactattggttcacccctcgctacgtattccttatccctcacacctgcgcaaatttcaacctaacgctctcatggcacaacagcccctgatggaatctttctctattttgagcctgtcgtcgagagtcctgccccctatttattctgctaaggcatcgcacgcccagctccccgatacacctctctgaagtcaccaagcaagcccttcgccttatcacaagtattcctcttatccagcggagggaaaagtacccttctcgtgaaggaaaagcgccttcacgtagtggtttttctctatctatgcacgtagatttaaagaccaggcacgtaaatccaaatatccacgcacgtagatattagagccacgtacgtagtccaaacttatctaccactcgtccacagctttttatccctacgaggagcaacaatctaataagagggtgtcacgaagcaatagtggttcacccgcagaccaatataggttcatatccccaccctgtagaagctcgctcgtcaccaccagaagagcagcccgtcaaaggatcataaagcataggcaatccccataactatccgagcctcatcgggaggtgcttcgggcgacttttgcctatgtgaataaataccttaactttgcctcagcatgtggcgacggagccttaaccaaactccctgccatgtgtaccgaccagaacccataggcctcagcgatctcgaggaaagcacatctcccccgcaagctccgaccttacgttcaccttatttaccactacatggcaagctatgtccagaagaattctactgctttgcctatctctcttgctcctttgtgcgcttgggatagcccccgaagcgcgtgcgcaagtcgttaggcaactactcatcttggtgcgtgacgccaagacgcagcaccctattccctccgtgaccctccacctcaagctagggccttcgaccagcacggatgccgaagggcgctgccagctctcactccctgccagcacaggaagcaccatcgtcctcagcctcgctaagccaggctatcagacgatacgcgagcacagctattcccttcccactgagggcaagcccctcatcatcgacctcgagccgcgcagcgagcgccatctggagggtgtgaccgtcacaggtgcggggaaggaaagttcacttacccagcaaagcaccgtcttacgcactgcccacctgcaggcgcagagtgagaagtccatcgcccgcctcctcgaggccctgcctggtgtcagctctatcaagagcggtgcgacgatctccaagcctatgatccaggggatgcacagtagccgtatcctcctcatcagcaatggtgtccgcctcgagagccagagctggggtgccgaccacgctcccgaagtagaccacacgggtgcaggtcaagtcgaggtcatcaagggcgccgaagccgtacgctatggcgcaggagccctcggcggtgtcgtcctcatcaacccctcccccctccccacagccgacgaattctcctaccgaggtcatgccaacctcggctacacgaccaacggtcgaggtgtagacgcttcgggcagtctcgagggcggacagcatggcttcggcctgcgcatgcagggctcttatcgccgtgcaggcgactacggcaccgcagactatctactgaataatacggggctggaggaatggagcgcctcgctcttcaccggctacaccaaggaccgcctgcgtgctacgctctatgggagtctgtactcgacagagagcggggttttcatcggttcgcacatcggtgacctcttcgagctacagcaggtcttcgctgctggacgccccaaccccatcaacatcacgcccttctcctaccatatcaaggcacctcgtcagcgtgcccgtcacctgctcatcaagggcgacgtcacctaccagctcgacgacaatcaggagctgcgcctctgggcagcctaccaagacaaccaccgccgtgagtacgagaatcgcaagatcgatgtctggacacagacccccgtcatggacctcatcctctcgacctacacgactgacctgcgctaccgcctacgctgggcacgtcccgactgggagacgcaggtagggctctcgcacctcttccagcgcaatacgaaccagccaggtacggcagcgacacccttcatcccgaacttcgccacactcaacctcgcagcctacgtcgtgcagaaggcacgcttcgatgccctccttctcgaggctggtctgcgctatgaccaccgcatcaccgatgcagctggccgtgactggcgccgtctacgctatggcgagaagaatacctacacgaatatgacggggagcctcggggcgcactaccgcttcagcgaaggccttgcagcccgtgccagcctcggcctggcttggcgcgctcccgacgtcaacgagctgtacagcaatggcctgcaccacggtggctcatggagcctcggcgaccgcaccctccgcagcgagcacggctacaaggccatcctctccctcgactaccgcaaggattggctgactatcgagcccagcatcttctaccagcacatcgacaactatatctacgacgctccgaataagaacaagggtgagaacgggatccacgtccactggagcggtgtctaccccatcttcgcctttgagcaagacgactgccgcttctggggtggcgacatcacgctgacggcacgccccaccgaggagctgaccttcaccgctaagggcgagtggatccgtgggcgcaatgtctcccatggcacttggcttcccttcatgcctgccgaccgctataccctcggggcacagtggacgagaagctggggcagcacaggtcgctggcagagtcgcctcagtgccgaagggatcagcgtagccaagcagacgcgcttcgaccccgagcatgagctggtatccgatatgcccgcaggctacttcctcttaggcctgcagggtgagcttcgctataccctcgatgcacgccgctctctgcgcttcttgctctcctcggagaacacgctcaacgccctctacaaggaggcctccgaccgcttccgctactacgcccatgcacctggccgcagtgtgaccctccgcactatcctgtacttctaactccccaagtgacgaccatgaccaccctccttatgaccctacgccgtcagcgtctcacctcaatgctcgccctccttctgagcatcttcgctctcttcctcccctcctgccaagtcaaggccgtggagcccacggtcgaggatatgatcaagggacacgaagagtgggcacgcgcactcatcgtcctacgcctcgggcgaatgcactcctcgggcaactatgtcgaggcctatgaccagcgacacaatgatatcctccccgtctaccagaccatcgacctgcgccgctcctcggggcagacgggtagtatcaccttctacggcgaccgccagtccttcgacgtcatcaagggcaaggacctctactatacgctggagatgcgctactacaacgataagcgtgagctgatgaactaccaattcatcggcttcttccctgacgacgaagaggggagcatgctgcctatccaccagcacttcttccagatcatgaatgtcgaccgcatcgggcgcttcagctacccgacgcacctcgacggcaagccctacgaggagttcacctacatcctcgatgatgcgggcaacaagcagcctgagaccgcaccgaactaccgcgagagcgatccctacaagcgcttccgcccgaatgacctcaagcgtctctcgcccgacgtcttccacttcacttaccgcgacaccgaccccattgagctgaccctcggagaggagtacaccgatcccgagaccaagcagcagcgtaccgtaggcttcctccgtcagcgccgctcacttgaccccacggcaccactcgacaggacggggctgaagggatggttccagttcctgcgctccgacatcgccttccagatgcagctgaccctcgtgcatatcaccgtcggcagtaagtatatcggccccgctcctgatcatctcttggagttcaatgagcgccacgacgcttggacggtcacggacatcaacctcaagctccccttccgcgtcatcgccgacgccgatggctcgcccgacaagtgcgctgccgatatcgcccgagagacgggcggctcagccaccgctatccgccaagcgctcttcgatggcggtatgcagcttgaccctaaggcgcgcatgtagcaccgactatttacccacctaatcatcaatacatcagactatgcgtacgtatcgtagccaggcagcagcctggatgcttgccctcggcctctccgtagggctcgtggcttgcggctctaagggcgacacgccccagcctactcccaagcccacaccgactcctcagcctaagccttcacccacaccacgcaccttcgagtgggcgacctgtgatgtcctcatcaaagaaggtcacgaccacggtcacggcaatatgcacggcaacaatgtccgccgcggtctcttctacccacaggagcagcgcttcaccctccgcaatgatggcggcggtaaggtcacgctgacgtgggaagacaagctcaaggatatgccctacttccaggcccatcagggcggggcactcttcggtatgctcttcaccttcaaggacgctaagggcaaccgcgtgaacgatgtgctcaccgagctcagcgaccactaccagatcttcttcactatcgcagagaaggacgctacgggcgctattcacgaagtcaaggatctgcgtacggacaagcccatcgcgtgggaccactacaccaaggccaagcccagcatccccaccacgacgctggagcagcgcaccaaggccatcttcgagtacgtctaccgtgacaccaaggatccctactatgagatgaagggcgacggcgatgctaaggaccacctcctgcgcatccctggcacgcagaacctcaacaagatcgggatgaagggtcacttcaagttcctcgaccgcgactgggactgggatgaaaagggttcacccagccagctggcctccttctacctcaagatcagcctcaagcaaagcacggggtcgaagttcttcaagcacgatcagcacggcctcatcagctccgagtcctaccagcctgagcccagcatccagtggacgaccgtcttcgaagtcctcctgcctgtacgcgtcatcgccaacaagcgtgacctgctgaagtaccccgcccgctactggagcgatatggctcgcgccttcaagaagactcccgaggagatgaaggagaatgacgagacctccgagcctggcaatgacgacagctccttccacatgtaatccataatcataatccttataatcaaccctcagcagtatgaagaaaatcagcagcactgcacgcgctctcgcccttctcttcgtgggagcctccctcttcgcctcttgcgccaagaagtccgacgaacctaagcccactcctcccgacaagaaggaagatgtcaagcctacccccaagcctaaggaaggtgagctccccgagatcacgaaggtcgtcctccgcttcggcgaatcgcacctccactctaagaagggtgtccactacatccccaacaacgccaagctgaacttctcgctcctctcccaagagcagatgatgaccttcgtcaagcagggcgatagctggcagctcgagaagggaagccccgagcgcttcatcggcaccgagatgatgagctatggcagtgtgacctccgcagcccccgactacgctctctgggtaaactactatgacgcatcgggcaagctggtcaatggcgcctacgctgatcccaaggtccgtagccagtatcagctcttcatctaccccagcgatgtcaaggcattcgacggagatgagcctattgacttcacgctcgacaagacccctgagctgatgcactacgagtactgcgacagcgacccctgggataagagcgtacagaagagccgcaagcaagaccctgaagacaagcaggctaagttcctccccgacaccgagcctatcggtatgaagggctacctgcagttcaagaagatctcgaagttcaacctacactttgtcttctaccacgctcccaagggtaagctcgtggatgaccagcctgcccccttctatgcgcccaacaagaacttcaccagcgaaggtggtaagaagctcttcgaagctagcgtacccttcttcgtatgtggtacgcgcgaattcaccgacgagctgaagtcggcctccgacaagcccctgcccctcgaccagctccgtagcgagtaccagaagatggctaaccacctgatggaagccctcggcacgaaggaatggctcaaggtcgcagctgacttcatcagcctctacaacggcacgggcgcagagtccggcggcgaagaatactaagcctccgctccctactactctatataccgtgagccccacacctccccgactatcgggggcgtgtggggctcactgcatctgtggaggctgttgccgcgagtcctgcccgctatttagagcgccaaggcatcacgcacccagctccccgataggcctctccgaagtgatacacaagcccttcgccttatcgcgagtattcctcttatccagcggagggaaaagcatcgttctcgtgaagaaaaaagcaccttcacgtagtggtttttctctatctatgtacgtagtcttaaagaccaagcacataaatccaaatatccacgtacgtagatattagagccacgtacgtagtccaaacttatcgaccactcgtccacagctttttatccctacgaggagtaacaatctaatagaggtcacttcacaaagctatatagcttcacaccgaaagctatacggaatcagtccaaagctatatagctttcttcgccatcctatatagctctatctacacacccatatacctaaggtgcttcggcaaggtgcagggtgggagattttcgtgcgggaggcgcaggcagacaaagcgggagtttgtgtattcgccaaagtattagtaattttgcgcactgattagagtgtatgtagcactctccctgcaatagaaagtataacaacaaaatagataagtaagacattatgatcgtagttccagtaaaagagggcgaaaacatcgagaaggctctgagaagattcaagagaaagtttgagaagaccggtgctgtgcgcgcacttcgtgcccgtcaggccttcatcaagccctctgtagctcgacgcaagaagatggagaaggccatctacgtcaagcagctccagcaggccgaagagcagtagtagagactccgtctccctcccttcgctgacagtgctcgcacgagcgaaggcgatcatcccgccctcgattacgaggctactccataccccatctcgcaccgctcttagcggacgtcaagaggtatcccaatgatttacgcaccgctgatatcccactctgagggtatcagcggtgtcgctttatccccctgagctatggggcgcacgaccccacgtatatcctatatcccaatagagccaccttctatgagtcttcacgaaaccctccagcatcgtcgcgccatacgctactacgacccagagaagcctctggatagcgcccgcgtcgaggaatgcctacgccaggcgaccctcgccccgacgagctcgaatatgcagctctaccgctgctaccatatcaccgaccctgccgtcatcgctgcgctcaccccggcttgtctcgggcagagcaccatcagcacggcaaaggaagtcgtcgtcttcgccatcaccccctcccgctggcgtgagcgtgtggatcacctcttcccccgcatcgtagaggatatccacaagcaccagcccgaggagaagtgggcaaagtacgaagctatgcagcgtgaatatatgaccaaggtggttcccttcctctacagccgtgggtgcaaggtctggggctgggcacgtcatctggtgatgaacgccatcgcactcttccgccccatgatgcgtcagggtaccgagtgcgatatgaagaccgtcctgcataagagctgtgccctcgtagcgcagaccttcatgctcgctatgagtgaggcaggctacgacacctgcctcgtcgagggcttcgatgcccgccgtgtacgcaaggcgctgggcctaccctcctccgtcgagccttcgctcatcgtctcctgcggtatccgtgatgagaagcgccccttgggcgaccgcatccgcgtacccttcgagagcgtctacgagcgtatcgggaagtaagaccgcccgcccatacgtgcgccccatccctcccgtagtggagagatggggcgcacgctgtgtataagtagtggataaggcgggggaaacccaccttcacataccgattacccgtgggtaaatgcgtatctttacacgatattatatagctacagcctcctctatgacaagacgattacgtgccctcttgggccttggcatcggccttcttacgacccttgcgctacccgcacagcgcaagcagatcgttcgccctcagtatcctcgcctctcgcagcgcgtgaatacgctcatcggtaccgactgggtgggcaatgtctaccctggcgcctcagcccccttcggcatggtgcagctcagccccgacaacgggcgggcgggctgggactatatcgctggctacttctaccccgacagcacgatcgcaggcttcagccacacgcacctgagtggcacgggagcaggcgacctctatgatatctccttcctccccgtcacccttcccgcactggacgaccgtctcacgcgcaagcctcaggcaggtaagacgggagaggagcaagcacctatcggcatacacgcacgcttctcgcacgctaccgaggtggcgaaggccggctactatgccgtgacactcgagccctatgacatccgtgtcgagctgaccgccaccgaccgcgtgggggtacagcgctacaccttccagaaggatgccgactcggtctgcatcatcctcaatctggacaaggcgatgaactgggaccgcaccgtcaatagcgacgcacgtgccatctcgcccacacagatcacgggcttccgctactccgacggctgggctcgcaatcagaaggtctacttcaccacgaaactttctcgccctgccgctcgcatcgagcgcacagctaccccatacatcctcagcaaggggcaagtaggtaaggccgtcggccatggcgtcatcctccgcctctactacaataaggtacgcgctggcgaaagcatcacgctctgcaccgcgctctctggcgtaagcgaagcgggcgcgctgaagaacctgcaggccgaagcccctcataccgacttcaaccgctaccgccaggctgctacccagcgctgggacaagcgtcttgcacagatccgtctctcagcggatactcccgatagcctgcagacgaccttctacacggcactctaccgcgcgcagatctgccccactctctatagcgacgtcgacggccgctatctcggtgctgatcgtgagatccatcagcgtgcaggtggcacctacagcaccttctcactgtgggacacctaccgtgcagcccacccactctactccatccttcagcccaacctccagcgtgacttcgtgcagtcactcatcgacttcggtgagcagaacgagggtcacctccccgtgtggaatatgttcgcctccgagaccgacatgatgatcggctatcactccgtacccgtcatcgtcgaggctgtcctgcgtgggatctacgtccctaaggacaaagcgaagctcctccgcctcctccgcacgacggctgagcgcaagggctaccgcggactggacgactaccgcaagaagggctacgtggcgagcgaccgcgaggacgagagcgtctcgaagaccctcgagtatgcctacgatgatgatgctatcgcacgctatgccgcctggatgggcgaccgcgaagtggagaagatctaccgcgagcgcgcccgctcctaccgccacctctgggacgaaaagacgggcttcttccgcccccgcaagagcaatggcgagctggatagcatcttcgatcccttcgcctacaccaagcccttcaccgagagtaatgcttaccactacctcttcagcgtacagcacgatatcgatgggctgacgaagctcatgcagggtaagctcggtgagcgccttgatgagttcttctcatccgagacccccagccacatcgagctacccatcttctctacggggatgatcggccagtatgctcacggcaacgagcctgggcaccacgtcatcttcctctacaatgctgcccgacagccttggaagaccacggacctcacacaccgcgtactcaagcagctctacaccgacaagcccgctggcctctgtggcaatgaagactgcggtcagatgtccgcctggtacgtcttcgcctcgctcggcttctaccccatcgatcccttgagcgggcgctacgaactcgtcacgcccctcttccgtgagagtacgatcagcctgcccaacggccgtatactccgcctctctgctcccgagctgagcgagaagaagcgctacatcaagcgcgtcaccatcaacgggcgtgagctccgcaagtcctacatcacctacgatgacgtgatgcagggcggcgagatccgcttcaccctcaccgatcagccgggtagcgtctggtatgaatagttcggatacgaagcgaagccatctcggggcgctcatcgccgccctcagcctcttcacacgcctacccttctggcgcctacgggagcttagcaaggccgactatgaggatgccctcagctggtggcccgtggcaggtctcgtgacggcgacgaccctctcggggagcttctacctctactcactcgtactaccctcggtgggagcagcgctggccttagccctcggcacgcgcctactcctcacgggcgccttccacgaagacggtctcggagacttcttcgacggcttcggcggcggaagggagcgcagtcagatcctcgcgatcatgaaggatagccacgtggggagctatgccgtcctcgggctcctcctctactacctcacctactgggcgctgggcacgtcactccctgccggctggctccctgcagtgctcttcgcctcggacatcacggggaaggtcacctcgctcctgcaggtacagttcctcccctatgctcgtcgcgaagaggatagtaagatcggggtcacctaccgcaaggcacgccccttggcgatctacgcagcgctggcgatcttcctcacggcgcagtggtgggcactgcgtcctatcgaggccacacccatcggagggagcgaactgacgcacttcgtaccgctctccatcttcctccccatcctcgtcggcggtgggttcatcgcctacctgcgtaagcgtatcgacggctacacgggcgatacctgcggagcgctctgcctcctctcagagctggcgacgctcacgggcttcgccatcctctaccgcctcggcttaggcatctaagtcacgatcccacctactaccatgcgcctgcacttcatccgccacacccgccccgacatcgcacgcggtgtctgctacgggcagagtgatatcccgctggcagcgtccttcgccgaggaggcggaggacgtcagagcacggctcactgagcggctcgaagggcgcacacctacccgcatctatagcagtcccctctcccgctgtcggcgcctctgtgaggcgctgggctacgaagcccccatcctcgacgcacggctcttagagctgaacttcggggagtgggagctgcagcgcttcgacgagatctccgacccacgcctccagctctggtacgacgactacctccacgtagcccccacggggggcgagtccttcacagagcaggcagcacgcgtagcagacttcatcgaagagctacgagatgaactcgcacaaaacgaggactcctccgtatgtgaagtcttagtcttcacacacggaggagtcctcctgtctgctgggctctgggctggctggtatcccctcgaggaggccttcagccaccaaagtccctatggagcgatctgtacgctggagctctgagccttagtcttcgctgaggaaggtactcacgatcgagtagaactccccgtagcagcgctccagattatcgttggtcagcacacggtcgaagagtggtgcatacgtcagctcgtgagcggccttcgccacacgctcctcgatgatctcggggctatccgtagagcgcccgacgaggcgacgacggagctcctcgatcgagggtggctcgatgaagatgctcagggcttcgtgcccatatcccttcttgatattcagcccgccgacgcagtcgacgtcaaagatcacgcggtcacccgcagcgatacggcggtcgacctcggagcggagcgtaccgtagtagcgtccggggtagacctcttcatgctcgaggaagtcgccacgctcgatgccagccttaaactcctcgggagagaagaagtaatactccacaccatgctgctcctgcccacggggtgggcggctcgtagccgagacggagaagccgagacgcagctcggggtgctcagcgagtagacgattgatgagcgtactcttccccgtacccgagggggcggagatgatgattagctttcccatagattacaatagaagcgagaggccggggacgggaaattaatcctcgtcctcgtcttcgtccttagcggccttcttcttgcgcttatccttgggcttgccttcgttgcgcagggcttccttgaccttctccgtcagctcatcgaggagctcggggttgtcggcgagcgtctgcttagcgttctccttaccctgaccgagcttcgtagctccgtagctgtaccacgagccactcttcttgatgaagtcttcgctctcagcgatgtcgatgatctcaccgaggcgggagataccctgaccgtagaggatctcgaagttagcgacgcggaagggaggtgctaccttgttcttgacgaccttcacgcgggtattgttcccgatgacctcgtcgccatccttgagctggccgatacgacggatatccagacgcacggaggcgtagaacttcagggcgttaccacccgtagtcgtttcggaggggccgtaggagttcccaccgatcttctcacggagctggttgatgaagatacaggcggtattggacttgctgatagcccccgtgatcttacgcagggcctgcgacatgaggcgggcctgcagacctaccttcgtctcacccatatcgccctcgatctcctgcttaggcaccagggctgcgacggagtcgatgatgaccaggtcgacggcaccagagcggatgacctgctcggcgatatcgagcgcctgctccccgttgtcgggctgagagatatagaggctgtccatatcgacacccagcgcttcggcataggagggatcgaaggcatgctcggcgtcgatgatgatcgccttaccgccctgcttctgcacctctgcgatagcgtggatagccagcgtcgtcttacccgaagactcggggccgtagatctcgatgatacgaccgcggggatagccgcctacgccgagagcgtggtcgaggttgatagagccggtggggatgacgttgacatcggtcgtggggcgagcagccatattcataaccgcacccttgccgtaggtcttctcgatcttaccgaggacggtctcgagggtcttcagcttggcctcatcctgggcctgcttctctttatccttagcgctcttggagagctttacttcttcactcatgtggaggttgtctatttatatatggctcgggagagcccgtgattaatcttcgtggaggatctgctgggcgtggtccttcgtattgacggccttgccacggatgatgcgctcgatacggccatcggtgccgatgacgaaggtcgtgcgctcggtacccatgtacttgcgaccgtacatgctcttctcgatccaagtaccgaagagctcattgaggcgcacatcggtgtcggcgatgaggcggaagggcagctcgtgcttcgtgcggaagcccacgtggctcttcgccgagtcacggctcaccccgatgatctcgtagccagcggcgcggagctcgctgtagccgtcacgcaggctacatgcctgcgccgtgcagcccgaggtattatccttggggtagaagtagaggacgatcttacgcccagggtagtccgagaggcgtacctcctgccctgcttcgtccaagcccaagaggtcggggacaagatcccccaatgtcagtgccataagcagcgtatctaataaagttctatgtatcgtttgcgggaaatgggaggcttcgcaaggcgagcaatctccctaatacaaaaatacgcatttgccctgaaagggacggcatcagcagtccatcgctgggaggcactctgaggggagaggcgccgcagccccctatgggatcgtgatgtacgcctaaatgagcctgttgcagcgagtcctgcacgctatttattgtgctaaggcatcgcacgcccagctccctgatatgcctctccgaagagacacgcaagcccttcaccttatcacaagtattccgcttatccagcggaggaaaaagtgctattctcgtgaaggaaaaagcaccttaccatagtggttttcctccgtctatgtacgtagtcttaaagaccaggcacgcaaatccaaatatccacgtacgtagatattagagccacgtacgtagcccaaacttatctgctactcgtccacaacttttattcatacacggagcaataatccaaccacaagaatattaaattatctttgcaacgttaaacacctaaaacatatacatgcgtatgaagaaattctctactctcttgctgagcctcgccctgggtagtaccctcgcggctcaaactcctaagttcactcccgaccgtggcgctctgctcgacgggaagagcatcgtcaaggctaacatcaccagccccatcttcaagaactacagcttcgctgctgagcgcatcctcacgaagggccttagcctgcagctcggcatcgctacgatgcctaagggtgccctgcccttctcctcatcgttcgagaatcacatcggccacgatgtctctatgagcagcgtaaagctccagtccttctacgtcacgcctgagctgcgctggtacacgggcggcggctacggtcacggcttctacctgatggcttactaccgctatcagaactataagctctctggctacacgctcaatatggacgtgcgcgaaggcgcttcttcggccgaaaagcccgttaatctcgacctcacgggggacttcaagacgaatagcttcggcttcggtctcggtgctcagtggctcttcggtcgcaataagaacatcgtcctcgactggaacatcctcggcgtgcacgctggtaagggtaagctgaccctcgcgggcgactactctgctacgaacctcaccgacaaggaaatcgaagacctgcagaagcagatcagcgagaacgtcagcgacctgcccaccatcaagctcgtcggtgaggatgtcaacgtagataaggcctctaagaaggtctctatcgacaacgtctccaccccctgggcttggcttcgtgcctctgtctctctcggcttccgcttctaagcccccgaggagataacttctactaaatagcgatcccccgcagcgacacggatgtcactgcgggggatcgcttttgtatggactacgaaggagctactgcttcttctgcttcgacttgatctgtaggatccagcgtgtgaggagacttgccgaggcctcgatatagggatcgacctctgccccgcgggcgatctcatccttgaggatgacatcaggtgtgatgccctgctcgatatcagcaccgtcggcatcgtacgtgcgggaagaagagaagcgcaccgcccagccattaggcagctcggaggacatcggcaggccaccgccaccgcccgtcttcaccccgacgatcttgacctgcgggaggcccttcatacggagcgtgaagtcattggcggcgctgtacaccccttggttcacgaggacgacgacgggcttgagccagatcgtacccgcctgcagggtatcgaggtagaagggagtgcgacgcgagaaggcatcgtgcgcaggacccgtcttgtgcgagatatagccgacgagcttgcgctcacggatgaagtgctgcgccagcatatcggaggtcgtgacttgaccacccccattattgcgcaggtcgaggatgaggccgttgcacgccttgaggcggttgagcacggcattcacattgctactggagatcgccgaggcgaacgatgccacacgtacgtagccgatgggctcagcacgacgcacgcccttcggataatccagcgacttgtaggccagcccaccagcgatgtggtagtcattgccgaggtagctctcgatgagcgtctcgtcgtaagagcgagggccttcgctccgccactgccagtagcgcccgtagtcgaaggtggagatcagattgacatgcccatcccgtagctcagcgaggagctgactcatcacgaggaagagtgagtcggtcgtcatcgtggggcgcagatcgcggcggtgcttgtggtagaggtcgcgccaggtcgtgccttgagggagcttgaggtcgaagtagcaatagccacgatcgaggatctcccagaggcggttatagttggcatacggatccgctgtgtactcgcgctcggtactacagcacgtgagcgagaggaggaggccaagcgcggcgaggagcttagtgaggtgcttcatatcagaagggcacaagggtcgagtgatcatcggcagcacgacgcccctcgagcggaaggatcttcgtcgtcaccccgatgaggaggctgtgctgatggcggtaggcggagaggtgattcagctccgtgcggcggtagtcccagcggtagcctaccgagagcgtgaagtagtcgagcacggggacatctacgctggtgaggacgaagcctgtgggagccttcagcggatgcgtcaggtagatacggcgcgagggctggccgaagtaatagagctcatagagcgtctcaccgaactcctgcgagaaagctaagcccaagaggtcggtatgagcgtaagccttgagaagtagtgggaggcgtgcggggccaaagcgaagcgagtagagtgccgaggggcctaccgagagcgccatatccagcgtaccggggttgttcccattgcgggagctgtacatacctccagcaagaccgacgacgctaccaccgatagcgagacgcccccagctgcctgcgctgatgtggcgcaaacgcccccagtcatagcgagcggtaaggctgtagatggagccattgccagcggggttcttcgtcgaggcaaggtcgacattcaagagcgtgtgccgtagccagcgcggatcggtcgtgcggggcgtgtagccgaagaggcttcctcgtgcgacgcgctgctctggcagcgagcggtagcccaagcgggtatgctccgaggtgtagctatagacttccccgccgtagttgagcggtgtgaggtaggtatgcccgagacgcatccccccgataccgaagtactggctgcggtaggtgatgttgctttggcgggtctgtggctctggtatcgtgaagaggctacgcgcctctgagcctgccccgaggctatccgctgcactctgggctctcagcggagccgagaggagcgccagtgcgagggccatgaggggcagagcaaggggcttattcatgatgggaagggggcttattcgttcgagctatcctcggtctgtccagcgaagaggtcggcttcttcttcctcagtctccgccatggactcgtcgtgctccgactcgaagacgggggattccttcagcggaggaagctcctcgacttggtcgatgaggtagggagcgatgcgcttaccacgggcgcggatactcttgaccagggcaaattcctcgacatcgatctcggtcgtacgcagctcaccacccttctcctgacgcccgatgaggaggcgtgggtagtacgtgtcggtcaggagcagcagctcgttcttggggttctccccgaggatattctcacgcttctgatcttcctcgatgctgaagcgcttgatgtaatggtacttctgatcggcatcgtagtagacggccgtccagatcttgcggggctcattcttctcgatgcgcaagaggttctcctcgatatggatagagtcgctgaagtcggtggtatagcattcgcccgacttgaggacgacgaggatgcggtcacgggcgtggaaggagccgaggtactggccctgctcgttgtagttcaggcgcaggatatcacggtcgaaccatacgtcacgcccaccgagcgtcgagaagcccttactcaggagtgataccgagtgcacctctgccttcgtcactaagagcccgacagagctacgcgacttgatggggatatcggagaagtccttctcgaactggaagaggcgctggcgggcattgcggatcttgagcttgacggcgaccttctccgcctcaccattgccgttggcagagaagtagagcacgcgtgagccttccttgccacgcgtcaggtcgtagacgcggtcacggatgaccgagagcacgttgaagcgcttagcgtagaccgagccgaccttgccatcgcggtagatgacgttgtagatcgtgcgctcatcattgcgctgatagcggttgatatagatgacctcctcgttgccgtagaacttcttatcctcgaccttaccgacgaagtacttaccggagcggaagaagatgatgacctcgtcgaggctcgagcagttgcacacgaactccgcatccttcagtgccgtaccgaagaagccctcctcacggttgatgtagagcttggcatcgagctcggctaccttcgtgacctcgatggtgccgaagttcgtgatcttcgtgcggcgtgggaaggctgccccgtagcgctggatgagatgctggtaccagcggatggtatagtcggtgaggtgcgcgatgtcgtgacggagctgagccatatcctgctcgatctgcaggagtgcagcctcgtgcttggggaggttgaagcgcaggatacgtgccatacgcagctccagcaggcggcgcaggtcatccgtcgtcactgggcggaggaagcgatcggcgaagggctcgatgcgcttagcgatatgctcgagagcagcggcttcgtccgcagcttcttcgaaggccttatccttatagatgcgctcctcgatgaagatgcgctcgagcgaagcaccgaggtactgctcttccttctccgagaggaggatcttcagctcttcgccgaagaggtacttcgtgcgctctacgctgtagcgcaggagctcgctgacggtcgtgaagagaggcttctcctcgtagatgacgcagcagttgggtgagatgctgacctcgcagtccgtgaaggcatagagggcatcgatagccttgtctgacgacacaccagtggcgagcgtcaggcgaatatccgtcgtggcagccgtcatatcgtcgacacggcggatgcggatcttccccttctctacggccttgaggatggactcgatgagcgtcgtcgtggtcttccccgcagggagctcggagatactcagcgtcttggagtcgatcttatcgatcttcgcacgggacttgaggctaccaccacgctcgccgtcattgtagcgggagacatcgatgagcccccccgtggggaagtcgggatagagcgtgaactcctcaccgcgcaggtaggcacaagcggcctctgccagctcgacgaagttgtgcgaaaggatcttggaggacaggccgacagcgataccctcagcaccctgcgccaagagcagtgggaacttcacgggtagtgctacgggctcgtcggtcgtgccgtcgtaggtcttcttccacggggtgacgcggtcgctgtagacagcttcgtgggcgaaagccgagagcttcgcctcgatgtatcggcctgcagcagcggggtcaccggtgaggatattcccccagttcccctgcgtatcgatgaggaagcccttctgtccgagctggacgagggcatcattgatcgaggcgtcaccgtgggggtggtacttcatcgtctccccgacgatgttagctaccttgatgagcttgccactatccatccgcttgaggttgtagaggatacggcgctgcacgggcttgagcccgtcatcgatatggggtacagcacgctcgaggatgacgtaggaggcgtagtcgaggaaccatgtctggtacatcttcgacaggttgctcagctccgggcggtaaggcaagccctctgccggctggtaggcggggggctcttcgtcctcaatgatatcgggcgtcacctcggggatcttctcctcttcgtcgtcgtgctctatattcatacgctgtctatatcagtattatacgctagcaaagatacggaattacccgcttctttccttgggaagcacccgcatagacccgtctcctatccagatctcacccacccagcgaaaagccatcgcccccgcctcttcgttcgagagaggcgggggcgatatgctataagagaggggacgggctaccagctattagctgaagagtagccgtgcttgtcccacttgacgtcgtgcaggagcgagctcttcacgccgatagagatgctgtagctgcggtaggggccgaaggggatcgcgttggcagtgaggctccagcagtggaggtcgcggctaatcccgatggtcatattcgcgatgcgcttggcgatgaagtcgtagctggcgttgacgttgaaggaccaattcttcgtaggctggatgctacccgagaacatcaagctgtgcatcagcccgtagttgtactcatcgcggcgagggtcaaaggtcgtgcgctggaggttcaccccatagctgagcgagaggctccaggggatgctgaccttgaggtagccatcttcgtcgtactcgccttcgctgtcgttagtgtcgaagaggctcttattcttctgccccttggcagccatatctgccagcgacgtgtcacgcccgtcggcaggagcaccagcgaggttggggtcttcaccctcgggcttgtccttatccttgggcttcttatccttcttccccgagaagaactcacgcagcttgcggaaggtatcgttgctcagcgtgtagctgaaggaggtacccgtaccacggaggctaccgaagcccttgccgttgaagatacggagcttattcacgcggtactcgctgacacgccccgtcgcagcgtccgtggtatgcccgtacatataggggtcgaaggcaccactgagagagagctggagtgagggcgagaagcgcagcgtgatgctggcgttgatatcggcgagctggaaggagtcggcagcgaggttgtagctcgagctcagcgagaggttgtcgatgaggctgatcttcttcgtggtctcggtgctgtcggtcttcgcgcgcaccttcatctcgaggttgttgtcgatgccgaagttgatcgcggcggtcttcccacgcccaggcataccgaagatatgaccatcgccgaagcgagcatattcctccgagtgggcgacaccggcattgtcgatgtactgcaggcggtcgtagtagccccacatcttatcgccgaagtctggcgtgtagctgataccgacacgtggcgtgatgcggtgacggatcatctgcaccttatcgccgaagatcttccacggctggaagaagccgtagagcgtggtatttaggctcgccgacgtggagaagtcgtacacgcggttgaagccatagatacggcgaaactccgtgcggtcggtcgtcgcattgtactccttgaccgacttgtaggtgtaccagcgctcgttgtagttcgcactcagcgtgaggtcgatgtagctgaagagcttgtacgacgccgagatgggtatgttgtgggagaagccattgttccagtccttgatgaggttggactggaagaggcggttctccttcgtggagatgctattgcggaactgccccgagtagctgatgctgatcttctcgtaccagcgctctgccccgacacgcttcttgcgcttgaaggggtagatacgattcatgctgatagcgatattcggcaggctcatcgtgaccatcgagtcgacagaggtctgcgtcgcttcgatagaggcggagatgcggaagggtgtaccagggaagttgcggctatagttgaccgaggagttcttggtattctgtgccgcgatgctggggttgtagagcgtggcgagcgagttgtggttgaaggagctcgtcgagtagttcacgctcgccgagaaggtctcgttggggttggccttggagtcctgcgtatgcgtccagttgatgcggaagtcacggctctcggagaagtccccgacgacatcgcgctcccccgtcttggtcgtgagatagctgaggttgacgctccccccgaagcggtagcgcttgcggtagttcgatcgggcattgagcccccatgagccgaggctataccagtcccccgtgagggccaggtcgacgtagtcgttgaaggcgaagtaataccccccctcgcgcaggtagaagccacgctgcgtctcttccccgtacttcggcatgatgatacccgaggaatagctcttattgaatgggaagaaaccgaagggcagaccgataggcatcggcacgtcagcgatgacgaggtacgaaggcccggcgacgacgttcttctgcgggcgagccttacccttggtcagcatgaagtagaagtgcggatgctcgtggttgtcacaggtgctatagcgcccgttctccatgtagaggcagttattgctgaccatcttcgtgcgctcggccgtgatatagccttcgccctgctgggtgacagcgcccgtgatgaagcccttacttgtcttgaagttgtagttcaggctcttcgcctcatagctctccccaccgtcgcggaactttgggtaggccgtagccttccccgtgctatcgaggatatagtgcgcgtagacgaggttgctgtcaaggttgaggcgcatgaagttcgcatccatccccttgtccttatagtccacggtactgggcccgaagaggtaggtcaagctctgcccgatgaggaccatcgagtcctgcgccttgtaggcgatgatatcatcgaagctctcacgctggcgacggcgacgctcacggcgctcggcttcctcggccgtcaggctgagggtattgagacgaagcgagctaagactgtcgaggctatcggggcgagtcatgagcgtgtcggccttcttctgcaggctatcaagacgcacaccaccagtgcccttgaggctatctgatagggaggagtcggggaggaaggagctgagctgcgtgagcgtactcgtcgtgtcggtagacgaagacgcacgcccccctgccaaggtcttctgctgtaccttggcctcacgcttgggagccttatgtcgcgtaccgcaggcagcgaggatgacgagggctacgacccccaacgctaccttctgtccgaattctgtctgtctacgcatctatgagataacgcccgagtgacatagggccagtatctctgctcgcccatttgccacgctcggtacgcctgcaaagatagctaagaattagataagcggccgccgcgctcatatcgtctctatccacccgcgctctcacccccgagaaaggctactcaaggagcaccttcgcggggagtgtagcacctcactcacaagagaggtttagagcgctaaggtatcgcacgcccagccccgcaatatacctccccgaagtgatacacaagcccttcgctttatcgcgagtactcctcttattcagcggagggacaagcatcgttctcgtgaagaaaaaagcgccttcacgtggtggtttttctctgtctatgcacgtagtcttaaagaccaggtacgtcaatctaaatatccacgcacgtagatattagagccacgtacgtagcccaaacttttctgccactcgtccgcaacttttctccatacgcagagcaacaacctaccatataggttcacccgccgagcaatataggttcatagcacccttctccaagaggctcaatgtgaagagcaaaaaagagccccttcttcctgcccgaaaagggacagagagaaggggcacgaagagcacaccgaggcgctcagtagaggtacgaactaccggccgagggcgagagcgatctgctgcgcagcattctccccatcgatagccgccgagacgataccgccagcgaagccagcaccttcgcccgcaggatagaggcctgcgacgacggggtgcgcataggtcatgcggtcacgggggatacgcacgggtgatgaggtacgtgactccacgccgatgagctgagcttcgcccgtgaggaagccacgcgtcgtgcggtcgaaggcacggaagccagccgagagacggcgcgtgatgaagtcgggcatccactcgtgcaggtcgctcgaggtaagccccatcgtataggacgacgagggcagcgtggacgaatggcggcgtgcgacgaaatccgtcatacgttgagcaggtgcacggagcgagcggttagccgccagatagctcttatgctcgaaggcttcgcaccactgcatcagggcaagaggcgatgcaggatcctcaaccttaatgcccgtagcagggatatcctcggggtgaagctctacgacaaggcctgagttcgcccagcgcgagccgcggttagctggcgacatcccgttgacgacggtctcctctggccccgtggaggcagggacgacgaagcccccaggacacatacagaagctatacactcccctaccctcggcctgcgccttgtagacatattcggcagccgggaggtacttccctctcccctcggggctgtggtagcggatctcatcgatgagcgactgcgggtgctcaagacgcacgccgacagcgatgggcttggcttcgataaggatctccgcacgatgcaggtagcggtagacgtcgcgtgccgagtgccccgtagccagtagcacagggccgtggaaggtacgatcccccgagcagacgacaccacgcacctcaccacgctcaaggatcagctcctccatacggcacgcgaagtgcacctcaccacccgaggcgatgatctgctcgcgcatacggcggatgatgatggggagcttgtccgtaccgatatgtgggtgggcatcgatgaggatcttcgggtcggcaccgaagcgacagaagacacggaggatcttctccacgctcccacgcttcttgcttcgcgtatagagcttgccgtccgagaaggcacccgcaccgccttcgccaaagctatagttcgactcgggatcgacgatgcccgacttctccagctggacgaggtcgcgacggcgctgcatcacatcctgcccacgctctacgacgatggggcgcacacccagctcgatgagcctgagcgcagcgaagagcccgcaaggcccagcaccgacgacgaccgacgagggtgccgacgagacatcgggataggcgaggtcggagaagtcatccacggctggctgctcgccatcgagatagacttcgacggagagattgacgaggatacggcgctgacgagcatcgatattgcgacggcgtaccacgaccgaggtgatagactccagcggcagggcgagctcacgcgccacgacctcgcgcagcgtagcatccgaagacgcctgataggggctcagcgtaagagagagggtggtcacaggaagacgggataaagagaggtacggcaaaaaagaaacctctaagggtgcgcccccatagcacaggtggcgatggggacctacccttagaggtggtagtgatgcgcccttgaattaggcagccttctgacggcgcttgtagaggtagtagccgacaccaccgacgatgaggacgccgaggatgatgaggccgatcgtcgtgctatagcgctggatggtctcggcgaagagctcgggcggtacggtcttaccgatgaagtagccgaggagtgccaggacgacgttccacgatccggcaccgatggtggtgtagaggaggaagcgactgagaggcatacctgccagccccgcagggatagagataagctgacggatccctgggacaagacgcccgatgagcgtggagctgataccgttcttcacgaagtaagcttcggccttctcgatcttctcctgactcagcaggcagaggcgaccgatacgagagttggcgaacttatatacaatcgggcggccgagatagcgcgccagatagtagttgatcagcgcacctatatccgagccgagcgtggcgaagagcacgacgaggaagatattcatctcgcccgtagccgccttgtaggctgcagggggtacgacgacctcagaagggaaggggatgaatgacgattcgatcgccataagcaccgtcacccagaagtagttcaggtgatggaggatatcttggatgaagcctaaggactcgatcatatctgtgggaggggactacttattgaccttcttccacgtatccttgagcgataccgtgcggttgaagacgaggtgatcagggcggctatcggggtctacgcagaagtagccgacgcgctggaactgatagtactcgccacacttagcctgagctaggaagggctcgacacgtgcttcgcgcacgatggtgagtgactcgggattgaggagctcagcgagttccttgtccttagcagcctcagaggggttctcatcgaggaagagacggtcgtagagacgcacttcggcagggacgctatccgtggcagatacccagtggatcgtgcccttgaccttgcggttgctctcggggcgaccgctgagcgtctcggggtcgtactcagcgtagacctcgatgacattgccgttctcatccttcttacagcccgtgcagcgcacgatgtaggcactcttgagacgcacctcctgaccaggggtcatgcggaagtacttcttcggagcatcctccatgaagtcctcacgctcgatgaagagctcacgcgagaagcggatgatgtggctgtcggagttgggatcttcggggttattgaggaagctcatatcctccgtctgtccctcggggtagttcgtgataatgaggcgcacggggtcgaggacggccgagccacgcagggcctggcggttgagatcctcacggacagcgtgctcgaggagcgccatatcgatgataccatcgtacttcgtgtagccgatcttatcgatgaagctgcggatggactcgggcgtatagccacgacgacgcaacccacagatcgtcggcatacgagggtcatcccagcctgctacgtggccctcctgcacgagctgaaggagcttacgcttgctcatcatcgtgtaggtgaggttcaggcggttgaactcaatctgtcgtgggcggtagccctcggggtgattgggctcgaccttcttcaggaggtctacgaagtaatcatatagcggacggtgcacctcgaactccagcgtacagatcgagtgcgtcaccccttcgaagaagtcgctctgcccatgagcaaagtcatacatgggatagacgccccacttcgtacccgtacggtggtgaggcaccttgatgatgcggtagatgatggggtcgcggaagtgcatgttcgacgaagccatatcgatcttcgctcgcaggatcatcgcgccttcggggaactccccagcgttcatgcgacggaagagatcgaggctctcctcgatgggacgatcgcgataggggctagcgacaccaggggtggtaggcgtacccttctgcgctgcgatctcctcggcagtctgctcatcgacgtaggcatggcctgcacggatcagctcttctgcgaactggtacagacgctcaaagtagtccgaagcatagtagatattgccccagtggaagccgagccactcgatatcctcacggatcgcatcgacgtactcgacgtcttccttcgtggggttcgtatcgtcgaagcggaggttacacaccccgccgtagctctctgcgataccgaagtccatgcagatggccttggcgtgcccgatgtggagatagccgttgggctctggtgggaagcgcgtctggatgcgtccatcattcttcccggcacgaagatcgccctcgacgatctgctcgacgaagttcaggctcttcttctcttccccactctctgctggggctacgctgttaggcatatctgacataatggtgtgtatactttaagagtatccgtatctattatcctttattatagggcacaaagatacctaaatatcacgggagcgctatttagctatggtggcggcgtgcgctgaggaggctgttggtgacgacgctgaggctactgagcatcatcagcccaccagcgagcatcggattgagcaggtagcccgtgaagggatagagcacacctgccgccacggggatggcgatgaggttgtagatgcacgcccagaagaggttctgatgaatggtcctgagggtcgtgcgtgccagatggaagaagcgctccaaggccttgaggtcggagctacgaagcgtcaccatcgcggtctccatcgccagatcactcccactgcccatcgctatcgagaggtcggcacgtgccaaggccgcagcatcattgataccgtcgccgaccatcgccacacgacgcccttccttctgcagaccttcgacgaaggccgctttctcctcggggcgcacgctgtctacgacacggcttaccccgacagcttcgccgacagcacgggcagcactcggcccatcacccgtgagcatgatgacctccagcccacgagcacgcagtgatgcgatagcttcggccgaggtggcacgtatcgtatcggcgataagaatgacggccagcacctccccactatgggcaaagaggctacacgtagcacccgagcgctcgccatcctctaaggccttcaaggcttcggcactgagtgcccccgagacctcttccacgaaggcacgctgcccgacacgataggtcaccccatcgacgacaccttccagcccacgccccgcctcttcgcggaagctcgtgggttcggctactccctgcgtagatacgccaagcgcacgaacgatagcaccagccaaggggtgtgatgaacgctcttcaagggcagccaagatagtagctaaggaagtatccttctcaccagagcaccagcgtatggccttcacttcgggacgtccctcggtgatggtgcccgtcttatccaagaccaaggtatcgacatggcctgcagcctccagcgcctcggcattgcgcaccaagagcccttcttcggcgccacggccgatacccaccatgatagcggtaggggtagccagtcccagagcgcaggggcaagcgatgataagcaccgtgacggcggcaacaaagccgtgctcccagccatccgcagggctaagtaagccccatacgacgaaggtcaagacggcgatgaggacgatcacgggcacgaagactcgtgccactcgatccacgacctgctgaatcggcgcgcgtgacgactgcgcttcctccacaagacggatgatgcgggagagtaccgtcgcacgacctacctcacgagctcgatagacgagcgtccccgagccattgagcgtaccagcatagacttcggagccagcgaccttcgccacaggaatgggctcgccactgatgagctgctcgtcagcataggattctcccgagatgacctcgccatcgacggcgaagagttcgtgcggcagggcacgcagctccataccgggctcgacctcactgacgggcagcgtgatgacttcgcccgaggggaggagttgatgcacggtcttcggctgaccgcccatgaggcgacgcagagccgacgacgtgcgacgctgtgctcgtgcttcaagcaccttgccgagaagaacgaaggctaccgtcatcgaggcggcttcgaaataaaggtggtgcaggtggtgcgcttctggcgcgatgaagaggtattcgcccagatgatagaggctgtaaacgaaggccaccgaggtcgagagcatcaccagcagatccatgcccgccgccccagcacgtagctgacgccagccgcgcgcgaagaagcccgagcctgcccagatgagggtcacggcagcgaggacagcggagatgagcgacttcgggagcgtcatcggcggccacatcatcagcaccatcacgatgagcgagaggacgactgccaccagcgtcttacgctgcagggcacgctcctcccgctgacgaagtgcctccagctcgcccacctcgggttcatcgatacgcagatcatagcccatagcagccacagctgcacggagcatctcgggggtacactgcgtctcatcatagactacaaaggccgtggcggaggcgaggttgacggtggcagactgcacgccaggcgtactctccagggccttcgtcgaatgagcggcgcaggctgcgcagttaagtcccaggagggggaaagatctcttgaccatatggaatgaatataactattagtacgggcaaggggtacgcctgccgtctgcagatgtacccctcaccgatgatcgatgcggtatggataaaacaacccataccgcctattcgttcggtcaagccgaagctggcacccttgttttgctatgctttgggcgcgtcgatgcggagcgtatagccagcggcctctaccgcagcccgaagtgcctcgggcgtgcagtgctcagcatcataggtgacacttgcctcgccagcctccagcgagatagtgacggagctaacgcccgccacagccttgagggcttcggtagcacgcgctacgcagtgcccgcagctcagcccctcgataggatagacggtagtcgtcagagcggccgtcgaagtgggcttcgcttcgcctacacgggctacgacctgctggaggtaagcggcttgtgcaggatgctcggcgacagtacgcccgccgggagcttcattgacgtacttccccgggatgggcaccttggtcttcgcccccatgcgataccattcatactccacatccacgtgaccgaggtcaatggcctgcagacctgcttcggagaggtcataggcgaggacggtcgccgtctgcccgagggcaatgaggacgaggcgtccctctccatgctccttcgccagacggaggatctcgggataactaccccaagcatccgtcgcaggacagaggacacgcttcacgctacgtgcgccatcgaagaggtcattgccgacacctaggcgcgacttctcgccctcgacgaagagcaggtcacgatccttccagatcgccttcatacgctcgatgtacgcaggatagtcgcggatatcatagcgccccatatagaagcgggtgaagttcgtatcgtagaagtcgtgttcgcgagcaagcttctccagtgcaggaaggcgcatcagagcctcacgctcgaagaagatgcggttgtacccgcggtggggggaggagtccttgaaggcgtagggcacgcagttcagatggcgctccgacgagggcacctgccacacctcatagaggcgcttaccgagggaggcatcgtagtgttggaaggtatccacctcttcggccgacgaagggcgctcgagttcgtcgaggtagcgctgcatgatctgcagctctccgtcgccaaagcggctcaccgaagcacccgtgcggaggatctcatcgagggtctcccacgagtcatgcacacgcagggcacgacggcgatcggccgtagctcgatactgttggctatacttacgccccttcagaagcatccagagctggacgcgcagggagtctttgatctgctgccaagtcatatattcttgtggaaagcttattggtctataggacaaagatagcgatatctaaggggaagcccgcgaaggagcgaggacagctccctacgatttataagaacgaacctatattggtcggcgggtgaagctatataggtcacgatgcgaagctatattggtcgagacgacgacctatatagctttggactgattcctatatagctttgtgaagtgacctctattaggttgttgctccgcgtagggataaaagttgtggatgagtggcaaataagtttgggctacatacgtggatctaatatctatgtacgtggatatttggatttacgtacctggtctttaagactacgtgcgtagacagaggaagaccactatgggaaagcgcttttttcttcacgagaacagcgcgttttcctccgctgaataagaagaatactcgcaataaggcgaagggcttgagcggtcacttcggggaggcatatcggggagctggatgcgcgaggccttagcactcgaaatagagggcaggactctatgcaacagcctcatttaggttcacccactgaccaatataggttcatatcacccttccctacgaggacgaatcttccccttcaagggtgggctaaacgcattcggctcctccaccctgcgttgggtgaaggagccgaatgactcgtatggggaggaagggaagtagccctaaggactattcctcttcgttggtgcggggcacggagggtgtagcgggcttcgctgcggactcctgggcttcacgctgacgggcaacagcctcttcgtagctcataggacgagcaggacgctcggcaggctggactgcggggcgctcgggctgagccacagggcgctgctcctgcacgacgggagcgggagtagtcgctggtgcaggcgtgggctgtggagctggagcaggggcagctgcgggggcttcggcaggacgagctacgggcgtcgcctcctgctgggggcgctgctggcgctcctgctgacggtgacggcggtcctcacgctgctgaccttcggcgggctgctggctacgctcggggcgatcattgcgttctgtacgctctgcacgaggctggcgctcagcgggtacttcgacaggcgtcgtagctgcaggcgctacctcagaggcagactgctgagtagcttcgctattgcgctcgggacgctcctgacgctcggggcgctgacggcggttgttgccgttgttattgcctccgttgccgccaccattaccattgttgttaccgtcgttattgccattgccacgaccttcgcgagccgggcgctcggactgatcattgctacgctcttggcgattctgctcacggcgttcgccacgctcctggcggtcattacgttcttgacgctcaccacgctcctgacgctgctcaccgcggtcattgcgttcgttgcgttcgccacgctcctgacggggctgacgaccaccaccctgctgaccttggttggactgcttctcctgaggctgagcaggagctgcgggctgggaagaagcttccttgccctccttattgtcgcggttcttcttgcgcttgctgcgagacttctcacgctggagggtctcatcatcggggcgctgacgaagtgagccactgcgctcacgacggatggactggagactgaggttgagggccttcaccgagatctggatctcccagatgcagacgcagagcgagagcgccagaaggaccataccgacgccgaagacgacgccaccagcgacgttccactccaggtagtagaggaacatagccacgagcgagaccagcaggctcgatgcaccgagcacctgcatccagcggatgaggtcaagacggcggtagaggttctcgatctgcttgagggaggtaggctcaccttcggggttattctcgtagcgctccttgaggctgcgcaccgtagaggcataggagaggaagcgattggtataagccaggaggatgagagagatcgccgagaacaggagcggcggtgtagagagattgaactcagtagtcataggatatgatgtgagtgatggggatgtaaaagggagggattggggggattagaaacgcggaggaaggagggccgcaagacgacgatggaggatcgaagctaagagatgcttagccacggtgaagtccacctcgtgacccacttcgccagcgatagaggcgaccttgccttccttgaagccacagggattgatgagctggaagggagcgaggtcggtgttgacattgagggcgaagccgtgcatcgtgacgtagcggctgctcttaacaccgatagcacagatcttacgctcgcgctggggatcaccgacatcgagccacacgcccgtagcgccgtccttcagccccgattcgatcttgaagaaggcgagaagctcgatgaccgactgctccagcagctcaatataagccttcagcccgagaccgaagcgctccagatcgaggatgggatagccggtgatctgcccagggccgtggtaggtgacatcccccccgcgctcgacggagaagaagtcgtagccattctcacggaggaagtcctcgctcatcagcatattcgtcgcatcggcatggaggcccatagtgaagacgggattgtgctcacagaagaggaggaaggactccgtggggcggtgctcgtgcttagccttcagctgggcttcgaagagctccttctgcagtgcccacgcatcagcataggcgatacggcccatatcgcgatagctgtagggctctacatacgctgggagaggaaggatacggggacccgcttcgtcgaccacgatatactcttggtcgtaagcaggctgcagatcttcggggagcatagcctccagctgggcatgcgaaggggcatggtgcgagaggtgcgtgagaagggtcagcttggggcgaacggcaagctcaggcagcaggcgctcgacatcctccaccgactggtggctggggtgcggacgctgatagcgcagggcattgatgacgaggagttgtgagccactgaccttagcccattcgctgggctcgatggtcttcatatcggtgatgtagctcacctcgccgatacgatagcccacgataggtagcgagccgtgcgccagcgagatgggcgtgacacgctcaccgaaaagctcgaaggaggcatcactcccctcctctatcgggcagagggtgaagcgaggcgtccctgggtaaggatggtcactgaagacgtagtgcatacgagcacgcaccgagtcgaggacgcgctgctgcccgtaaatggggatatcctgacgccacgcgatggtacgcacatcatccaggccgaacgtgtggtcgtagtgctcgtgagtcaagaggatcgcatcgatacgatcgataccgagacgtgtggcttggtagtggaagtcagggccacagtcgatgaggatacgcttcccaccctcggtgatgatgagggcagaggtgcgcagacgacggtcacgagcatccgagctatggcacacagggcagccacagcctacctcggggataccagtgctggtgcccgtaccgagaagaattaccttcatgtaagtaggagggagagctaccacggcaaagagataccttctctatcgagtgagagagggtgcgtggtagagcgagtagttaggtgaataagcagcgaggtgaagggtggctatctaagagatgtacctcacctcaggggtgatctgtaggccaaagcgctctgcgacctgctcctgcacatactctgccaagcgagcaatgtcctgccccgtagcttcgccatcagcattgacgaggacgagtgcctgacgctcatagacggcggcatgcccgagacgatagcccttgagaccacagcggtcgatgagccagcctgcagggaccttcacttgtccgtcggggagatcgtagtgcggtgcttcgggataagcctcacgaagacgctcaaaagcctcggccgagatgatggggttcataaagaagctacctgcattgcccaaggccttcgggtcggggagcttctcttgacgaatgcggatgacctcgtcacgtacatcacgggcggtaggcgtcgccgtgcgagcccccacgcgctgacggaggtcagcatagtcgagcttcagatgggggtgcttggagaggcgaaggaggacgtgcgtgacgatgtagtcagctgcctcgggctccttgaagaagctatggcgatagctgtagttgcactcctcgacagcgaagtgacgcacctcgcccgtacgacgatgcaccgtgtgcacctcgcggatgacctcgcagatctcagcgccataggccccgatgttctgcacagcggcagcaccgacttcgcctgggatgagggagaggttctcgacgccgtagagctcggcttcggccatctgggctacgaagtcgtcccacttgacgcctgagccgacgaggaggtcgaccgtatcggccgtctcagcgagacgctcaatgctttggatcaccgagtggagtacgatcccatgaaaattggtgaggaagagcaggttgcttccctcaccaatagtgatacagcgacactcttggaagtactcgtcacggctcaatagctggagatcctcgatgctggcgaaggggataaaccagtcagcctgggcatcgataccgaaggtattgtgctcacgtagcgaatagctctgtagtatctccatatagatataggtagccccgccccagggattggggcgggggctataaagtctgattagttatcgttttccaggagccatgcatccttgaagtcaggagcaaagcgagccttgatagcgtcacggcttgcaacagcttcttcgcgcgtatcgaagctggctacgatgacacgcagcatacctacgtcgttggtagcgaggacggcgctgtagccagcctggaccatacgatccttgaggttgcgagcattcgtaggattctggaagctacctacgactacgctatagcgcttcagacgggtagcatcttcgccctggtaagtcgtgacacgctccttgcgtacggtcacggggacagcaggagcagctgcaggagcttcatactgtacggctggtgtggtgctctgagtagcgacctcacgctgcttagcctgctcgtaggccttacgataagcgctcttcttcgcaccgcaggagctcagcgaagcaactgccacaagtgccagagaggccaagatgatcttcttcataattctcattctatgattatggacgtgatacaatgtattgtagaccaatggctacaaagataacaatttgtcaggactgggtggcaggacgacgcagcacatagtggcgcacgagaccccacacatagaggtagtcttcacgggcaaagaggtagaccaagaggagataggtcagccctaatactgtactcccaatagataaacgccaaaagtcggcaagtgatgataatgcataggtatcaagtgcccaaaggacgccaccagccgcagcactcatcagcgcaaaggggaagagttcaccgagctgctgaccgagggggaagtcaatgaatcgacccgagtaatggctattgatgaagaggaagatcacctgcgtgatcgccgtactccacagtagcccgtagataccgaactgcaagccgatgaaggctgcagcgaccccgatgatacgccggataatctccagacggaggtgcagatcactgcggcccttggcctcaaggagattgatattataggagttgatagggaagagaatcccacagatacagaggatctggaagtaaggtgcagccgccatccacttatctccgtagaagaagtggtagaggggattagccagcacgaccagcgcgatcatcagcggacaagagagctggaataggaggcgcatcacacgacgatagcccgcacgaaggcgctccttatcattctggaagcgcacgaagacggggaaagtcaccttgttgatggggtcagcgatgaccgagacagggacgatatatagggcgttagcattgccatagagcccgagggtcgacagcgagaagtagcgcccgatgaggatcgtcatcaggttgttgtacagcgtggtgatcatcccagcgccgaccatacgcgagccatagccgaagtgaagcttgagcttctccatgctgaagatcatcttaggccgccaaggggacgagcaccagtagccgatgaggcgcacgatggagtttgccagccccatacccaccagtgaccagtagccgaagccgaagtaagccatcacgatacccgtcagcccagacagcacacccgaagccagctggatgagcatatccttgcggaactccatctgacgccaaaccaagattgcctggataccatacagcgagttgatgaccacgctcagcgagatcacacgcaggacggacactaagatgggattgcggaagtactctgcgatccacggtgctgcgatgaagaggatgaggtagagcaggctactcatcccgatgttgtagtagaagatcgtcgagaggtcggcatcatcgacacgctccgagcgcgtcagcgagctcccaaagccaatatcggcaagctgggcggagatagcgaggaagatccccagtacggcgagcgtaccgaagtcctccggcacgagaaggcgagccaaggcgaggttcaccacgaaggtagtcacacgcccgacgatctgctggatcgtcgaccagccaaagcccgagacggacttcgccttgagctccgagacgtcgtcagtgagttggcctatagcttccggctcaggagtgggtagattctcttccatctattaatctaggatatactattcttcggaatgggtggagtcgggggcttcggggaggagggtcaccccatagagttgctccagacgggagcgtagctcagctgcacagccctggcgctgctcgagctcaaggaagcaggactctctaaagtcctgcacgacgacgcgcgcttcggtctccttgacgatgcgcatcacgggacccatcagctcatagctgaaggtcaggcggatgcgctcagtaaggatacactcacggcggggcgcatcggtgagagctgccaaggctgcttcgcgatacgcctcgatgagaccgctcgtgccgagcttcacgccaccaaagtagcgcacgacgaggacgatgacctccgtcagccccagcgagacgaggataccataaatgggcttaccagccgtccccgagggctcgccatcgtcattcgcacgatagggctcacccatagggcccagacgataagcccagcacacgtggcgggcatcgtagtagcgggcacgcacctcgcgcacacgctccagcgcctcctcctcggtcgtcacgggataggcgtaggcgaggaacttacttctcttctctgagtactcgccttcgctaggctcggcgagcgtccaatagctgtcgcagatctctgtcgtcgggctcacttaggcaaagaggtgggaggcgtagatgtcgagagccttgcgcgtagcgtcaaggcgctcagagagctcggggctcgcagcgaccaagggcagacgcaggctattgctgtcgatgagacgcatgaggtagagcagggccttgatcccgacgggattcccctcctggaagagctgggtattgatggcgcgcatctccgtctggatcatgtcggcctcattgatacgtccctccatagctaggtgcgtcaggtgggagaagaggcggggataggcgttgcccacgacggagatgacgcccacggctccattctggatgaagggcacggtgagcgcatcatcgcctgagaggacgacgaagtcctcgggaagctcgcacgcggtgatctgtgccgcctgctggggatagcccgaagcctccttgatcccaatgatattatcgaagtcccgcgccaagcgcacggcggtgtcgggagccatattcaccccgacgcgccccggcacgttgtagagcaccagcggtagcggactcgcctcggccaggtgggcaaagtggcggtacatcccctcctgcgaaggcttgttgtagtagggcacgacggagaggatgcccgagagaccacgaggatcaagctcacgaaggcgctctgccgtctcacgggtattattacccccaaggccgaccatcagcggacagcgacctgcgacctgctcgatgatgtggtcggtgacccgctgacgctcctcgcgcgtaaggcagggtgactcacccgtcgtcccgtggatgacgatgaagtccgtagccccatcacggagcagatgttcgaggaggcgctccaggctcttatagtcgacctcttgcgattcggtgaagggcgtgaccagcgccacacccatcccgcggaagggatgcttactcatagcttatcattctatgacaaatacgtgagagaaaaaaaattccctcacacaaagttaagtattttacctatctataagtatgcagcaggccccgcacccttcgagaggggcggggcctgcgaccttataccttagatataaggggatcctattggggaggggttagagtccctgctggggctttctaccatcatcaccctggtacgtcgtggagtatgcacgcagaggttggtaggtaaagttgctatacaaaccacggacatcatcgtttgcacctcccttattaaggccataatagataccaccactgaaggcattatagccatagaggcgattcgtcatggggatgcggttagtagcattgacagcctcgatcagctgcttgagggccgtcttgtcataagccttgagcatcgcgtcattctcccattgacctgcgactgtcccccagtgcacaagcttaataccctctgctgtatcccaggtcttcactgtagagtagggctccaggtaagcatcctttttcagcacatccttcaccgtattagcattgatcaggatacgtgtgaccataccgcgagtaggctctgcacctacaccgaagagatcggactcttggaggtaggtaaagggcttcgtcgcattgttaggctcgacatagagaggtgtcgtgacgatattcccaacgaagtacttcccgagatagagtgactcgataaccatagaggtgacatacttaccaccatcaacaagcttcatgcgtgtcaggtagcgaaccagcgtctggtacttactacggggatgggcgcccgtatccgagcgacgaggagagatatacagctggcgataagcatagccaggagcgtcatcagctacatcctgatccttcttagcgtagtccgcacacacgaagcctgcttcagagaagtcagacgtatcatcgttcgtagccttataggggagcagctcattatagatatacgcacggtagtcgtagccactggagccctttgcgaacttgccgctgaaatccttgaagcgtccacctccagcactgaattcgagaggccagaagagactcatcagattgagccaagcctgattaggcatatacatcttacccttagaggtcgtcacgccagcaatgcgcacctcattagcctcagcagaagataccaaaggcacggcacgaagagtgggtttgttgtagtgctgcgggtcattagttagaccaccagcattgacatcatggtgcttccacgtaccatccttatagagatagcccttatcaagatagccgagggcctgacgaggctgcgtgtagaattcgcaattcagcgtgtaagccttaccatcggcgggggcgaagtttgcaccaccgataggagcaatgctatagttaggacgagcgatgacctgaccaccgatcttaggattctttgcatagacgtggatcagccccgtagcagcattgataagcagaccattgtcgtccagcttgttctccgaagcagaagcaacggcgagagcatcccccttatatccccagaagaccacagccttatctgagcgagcaccaccacgagcaacggtgaactgagccgcagagaagtccttatagaagtaggtgtaagccttaccgccatcgacagccgtgctatacttactggtgtacttggtagcctccgtagtcagctccgtagcagcgttctttgagcccttgagcttgaggagcgcgggcttcgaatcgttgttgggaccgaagtagttgttcgtaaccgcagtgatcccgtcgaaggtaacatcctggtccatgttgttacggaaggtcaccagaaggagtgagccctggggcttcagctggctggtggtagtagatacaggaaggagcttgccatcggtgaccttcaccgagataggtgtagaggcgtagaggataggcaggttgacaggagtagaagcagccgaagagaggctgatctcttccatcacaggagcgaccttgaagctctccgtcgtagcatcgtagctcgtaccaccggtgtagaccgtgaccgtaccattagaagaggacagcgcagaggccagggcggaggacagtgagatattcttatcgtgacgatagcgaccgaggggctcttcgtaggtcatcgtagagtgaacgttctcgatgagcgagccacactcgaagtgcaggataacatcgatcgtagggttagctgcgacgaagttggcacgaagcgcagagaggatcttctgattggtagctgttgggttgaggtcatcatcgagctcacccttagtaccgtcctttaccgtgacagggctctgggggctattgaaggcacgagcactcttaggcgtctgcaaatcgttgaattcgttcacctcagcgtcgagctggagaggcacattgacacggggaccattgtcgacggtctccgtattcgtcttgcttgactgaggctcatccttggcacacgagccgaggagcagaaggccgcagaggagcgaggtaacagtgagtaaatttagtttcattgattgcacgttaagtagatctaatacagcggatttgattagagtagcttagagagcttcaccttcttcgaagtcttcgaagccggcttcaccagagaactggatacagatattgagaggagctgcggacagctggaaggcatcagccacgggggcttcgtaggggagcttgttgtttacgttcatacgttagtcttatgaataatgtgtgagaaggacccgcctcgcctgcgccttgctgagctgataggtagagagctcgcgcggagtacagcgacatcatatagcatacaaagtcgaggcgtagtcctaagggaaaattcgcacaaagataattaaaatgtttaaatattcagtgacagaagcgggttatatgtgcgaagaagtaaagaggtacgttgcgtctctccgagtggccttcccctgaaggtcggaggggctacccgcaggcgatggcgcgatgcctctatacaccactatcggagcgagtgcacaagggcggggaaagtaaccagtacaggttcgcgtggcgacctatattggtcactgcgtcaacctatattgagactgttgcggcagagtcctgcgctctatttattgtgctaaggcatcgcgcatccagctccccgatatgcctctccgaagtgatacacaagcccttcgccttatcgcgcgtattcctcttattcagcggaggggaaagtgtccttctcgtgaagaaaaaagcgccttcccgcagtggtttttccgcatctacgtacgtagtcttaaagaccaggtacgtaaatccaaatatccacgtacgtagatgttagagccacgtgcgtagtccaaacttatctgccactcgtccacaacttttatccatacgcggagcaatagtctcatattggttcgttctgcgacctatattggtccacgcgtcgacctatatagcttcgcccagcgaccaatataggtcgtaacaccgcccccaaagcatcctactatctacctcacggagagcgcaatgcaaaggaggacaaaaagtgaggaaatggtggggatagtggactacacttcgagagaggctaagcctcgaaacagagtgaagtggggcaccctatctatagcggtgcacaggcgaagcattataaggccgtgctgaaacgactactggtccgcacccgaacaactattggtatcagggtcaaaccactattcgtttggaatccaaaccactattcatttgcaatcggacgaatagtggtctgcttgcgaatggctattgctttcgacttccctctctacgacttcgctccaccgcccccacgaataccagctgaaaagccgtgccgagtacccacgccttaccccaccgatgcggtcacctgacggagcaagggagtccagcgtagaatcgttatatttgtaacaacgaggggaagctgacgcccagcctccccgactatcaagcaaatacctatggaacggatcatcccccatgtcaccaacgagacagctcgcctccgagctgtcgtcctcgggctccccgacagtctgggccccatccccaccctccaagagacctatgatgccaagagctatgaagccgtaagccgagggatcttccccagcgaggcggatgtgcggcacgagatgcagtgcgtccttgacgtcctcgatcgctacggcgtccgcacgctgcgccccgccccactcaccgactacaaccaggtcttcgcccgtgacgtagcctttaccatcgacgacaccctcttcatctccaatctcatacccgaccgcgagcgggagaccgaagcctttgccagctcgatcttccccctcattgaccccgcacatattgagaccctccccgaggccgtccacaccgagggtggcgacgtgctcctctatgacgatatcctcttcgtcggggcgtacttcggcgacgactactccagcttcaagaccgcccgcacgaaccgctacgctattgacttcttccgcgagcgcttcccccacaagcgtgtcgtacccatcgagctacgcaagcacgaccgcgagcccgctaagtccgtcctccacctcgactgcgccttccagcccgtgagccgtggccgcgcactcatctatcgtgagggcttcctccatgagtgcgatgtcgccctcgtcgaggagatcttcggccgtgacaacctcttcggcgtcacccccgaagaagcctactacatgagcacgaacgtcgtctccctctcacccgatgccctcatcagcgaccgccacttcacccgcctcaatgcccacctgcgtgaggcgtggggtatgaccgtcgaagaggtgccctatcaggagatctcgaagatgggtggcctcctgcgctgctcgacgatgccgctcatccgcgactaagcacccgtagcaccgcacgctactcccccctctacatacagacaaaacgaccgccgccccggcactcctccgtcaagaggagcaccggggcggcggcgcttttagcttagagctatgcgggtgggcttagttcttcttgtacttagaccagtcgacgttgcgcatatcccccgaggctgcgatctcctgatggaaggcaaagcaagcatcgaggcactgaggcgtctgacccttcacaccgaggttgaggtagtcacgcagcagctgcttgtagtcggggtgtacgcacttctcgatgatctcctcagcgcgctggcgggggctcttaccacggaggtcagcgataccgtactcggtgatgatgatcttcacagagtgctcgctgtggtcgaggtgcgagaccataggtacgaaggccgagatcttgccgtccttagcggtagaaggcgtggtgaagatcgagagatagccattgcgagcgaagtcgcctgagccaccgagaccattcatcatgcgcgtaccgttgacgtgcgttgagttgatgttaccgaagatatcagcttcgagagcggtattgatggtgatgacaccgagacggcggacgatctcaggattgttagagtattcctggggacgcagcaggagcttgtccttgaagaagtcgaggttgccgtagatctcctggatgacggggcgcgtcacagagagtgagcagccactggcgaacttcacgcgccccttcttcatcagctcgatgacagcatcctggatgacttcggtatagacctcgaaggcagggatctgcttgttgtcaccgagagcgccgaggacagcgttagctacgttacctacaccactctgcagggggaggaattccttaggcagacggccagcttccatctcagagacgaggaacttagccacgttgtcaccgatagccttcgtgacatcatcgaggggagcgaaggcaccttcgtcgttgggctcgctcgtacggacgacaccgacgatcttagcagggtcaaccttcacgaagggctgacctacgcgatcgctggggctatatacgggcatatcacggcgatgaggaggatcgagaggctcagcgatgtcatggataccgcggatttccttgggatgcttgtcattcagctcgacgatgatcttgtccgccaggcggcagatcgtggggaggataccgacaccagaggtgggtacgatctcaccgtcttcggtgacgtcagcagcttcaacgatagcgacgtcgatcttgccgaggaagccatagcggagctcctgagcgagcatcgagaggtgcatatcgaagtaggggtgctcaccggcgttgatgccgttgcgcatatccttgttcgactggtagggcgtgcggaacttaactgcacctgcgcgagccagtgcgccgtcgagacggtcgcccgtgctggcaccagtgaacatacctaccttgaatgggcgacctgcagcgtgctcttcttcggcgcgcttagcgatagctccaggtacgaccttggggcaacctgcgggggtaaatccgctgaaaccaatgttgtcgccgtcctttacgagtgcggctgcttcgtcagctgtgataaacttcaaagccatgattcttcgattatagtgtgttattagtgacttatctaaagcgaagcgacgggcacacgagagggtgcggccgcgggcttcctacccgaggtccctccgtagtgccccatcctaagggcaaatttaggaattaattcgctatttctcgtgacccaagtgcttcttgtagaggtcgggtctcaggcgctttgtacgctcgagggcgcactccatcttccacgcttcgatacgggcggcgtgcccactgaggaggacgtcgggcaccttccaccccttgtagtcggcggggcgggtgtagataggtggcgcgaggaggtcgtcctggaaggtatcagagagtgcactctctgcgtcgccgatgacgccaggcagtaggcgcaccacggcatccaccatgatagcagctggcagctcaccgcccgtgaggacgtagtccccgacggagatctcacgtgttatgaggtgctcacggatgcgctggtcgatccccttgtagtggccgcagaggatgatgaggttctcctgcaggctcatctggttcgcaatgccctgatcgaaggtctccccatcgggcgaagtatagatcacctcatcgtagtggcgctggctcttgaggtcggcgatagcgcggtcgatcggctcgatctgcaggatcatccctgcctcacccccgaagggatagtcatcgacacggcgccacttattcgtagcgtagtcacggatattgtggacatgaagctcgaggaagccctgctgctgggcacggccgacgatggagtgctggagcgggctctcgaggagctcgggcacgacggtgaggatatctattcgcacgtagggatatacttatttgatcgggttaggcggagggaagggggattagttcttaggcgcgggatcagcgaagtacgtgtagctgatattcgccgtgtaggtggtcttcgtcttagcgacacccttctcgatggtgacctccatcttcgtggggaagccctcggtattggtctgggtgtacttcacctcgtagtagtagcggtcgatgagcttgagcagggggagcttgtgctccttgtcggcatcatactcagcctgcgtacgggggccgtgggtctcgcgaagctcgcggacgatgtcgcccgtatcgccataggtgtaggtcgagacggtagcaccattgggcttcttgaggtcctgcttagctacgcccaccgaggtgtcgaaggtgtggatctcttcgaagagcttacgcccatagtagtccacacgcatacgtgcctgctcgtggtagagcgcgcccgtgccgccgacagccttggggtcggtgacgagggtgaaggtgcgggactcgatgatgggatccatgtaggtgtagttcgtgcgcaggacggtctccttgggattagcccctccagcagaatagtcatagacggtgcggacgacacggctcaggcgcgagccctcgagctcatgcgtgacgtcggcgacgagacgaccttgggagtcatattccttgtagctactgacgtagctggcctgcggggagaaggggcggtaggtgtacttcgtctcggtgcgctccttcgtgccggtggcggtgagcttctcgacgacctcgctgacgcggtagccctgctcgtcgtaggtattcgtcgtcgtctcgatgggctgcagactaccccccgaagcggggatgccatagacgaccttcgtcagaaggccacccgtacggcggtagacctcttcggtgcgctcctcttcggtgcctgctgcagagagacgggtgatgacgcgcttctctaccttacccgtgagggtggagaggggcttaattgatgggaattcgggggtgttctttcccttaccaaggcagctgggcagcatcagaagggctgctgccgacagggcggtaaggcggctgatgattctattcatatcggtcacatcattagatgggggtgcggtgctctcgggagaaaggctgcgcccctacatatataataggtactacaaagctaagacaaaatgcacatatcgtgctgtcacgccctctgtacgcaaagcccccgagccacggctactctatgcaggcaaaagcgacgcttcacgatatatggggagacttcgcgatagcgagcgaggggatagcgagcaggcttcgctatcccctcggctctatttagatggagtgtaagggcggtattcgtattgaaggggtcgcgggcggagagcgtggagcgtaggttgcccatacgcttgctcaccgaagcatcgatccaccactggtgctggatgcgatagagctcatagagcactccactataataggtcacaccgaggtcgatcgtccaatatgagggagcacattgctgacacgcatactccttaacgcattgagtatagcaagtatggtaacacctacatcggcaaacacggcagcccacatgttgacaacgcccaacgctcccaacagcaacatcaggagtttgatgccgatggcgaatacgatgttctgtttcactatgcttaacgtcttgcgcgctatcatcataccttcgacgatattcgtgggattatcattcatcaatacgacgtcagcggcttcaatggcggcgtcactgccgacagcccccatggcaatgcctatgtcagcaagtttgatgaccggagcatcgttgatgccgtcgccgacaaaagcgatgggagaccgggcatgttcttggcgcagtgcttcgacaaatctcaccttgtctatcggcagcagctcggcatggaactcatctatgttcacttttccggcaacatctttagccacatcactgcggtcgcccgtaagcatgattgttttcccaactccagaggctttcagcctggcgatggtctcggcggattgcggctttaggctatcggaaacgacgatatatcccatataagcgctgtctacggcgacatggacaatggtacctatcttttcgcatgactggggagacacaccagcacgcgacataagtttttcgtttccggcataaaccttacgattgtcgatgattgccatgacaccttcgcctgcaatattctcataaccggtcactcttgttttgtccaatggcaaattgcaggcatcccgtatcgatgccgacaagggatggtcagaaaaactttccgccaatgcagccaattctataagctcatgctccgacatcatttgggaatatacggcagtgaccgagaaattgccttctgtcagagtcccggtcttgtcgaacacgactgtttttatatgcgccatcatttccagatagttggagctttttacgagaatgccctttcttgatgctccacctattccgccaaagaacgtcagcggtacagacacgaccagtgcgcaggggcaggaaatcaccaggaaaatcagagagcggtttaaccagacaagccattcgccgcccacaatcagcggaggaaccaaggcgagcaatgcagccacagctacgacagcaggggtataatagcgtgcgaaacgggttatgaacttttcactcttcgccttgcctgtatccgcattttctaccaaatcgaggattttcgcaacggtcgattctccaaatgtcgccgacgtacggatatgcagaacacccgtgagattcaggctgccgctgataacggtatcgccttcggaaacctcacgcggaaggctttcacctgtcaacgccgccgtgtcgagagtcgtacttccggagattatcttcccgtccaatggtattttctctcccggtttcactacgatgatactaccgaccgggacatccgatggagacactcgtgttagacttccctctttctcaatattagcataatccggacggatatccatcaatgccgcaatcgaagcccggcttcgttccaccgctatatcggagaaaagttccccaatctgatagaacatcatcactgccactgcttcggggtattcaccgatgacaaatgctccgacggtcgcaatagtcataaggaaactctcacccaaaaactgccctttgcacaaattacgcaaggcggcataaacgatgtccgcaccgattatgacataggcgatggcacataatccgatgtggatctcttccggaatagccggaatatatgtcgccattagcaaaacgatgctcgcaatgatgcgtatcactttgattttttgttctttttccataaccaatcatttaatccgctgcaaaagtacggaataaaaactgctaccaagttgcaaagtcagtcgtgccgcttatttcagcaatcagggcaaagaccttctaataataatcggcactatacaactcaattcctttcggataatgcaccatcggaatataggtatggtcgagacagtatgttttatggcaactctaacagtagaaatgacaatgtattttccactacgaagcgcaacactttggttgcaaattcaggcagaaaacctcgtgtggggtgtggtaacctaacttctttctcgggcggttattgaggctccacttaatctcctgcgccgcctcacgatacgcggggagatttcgcgatagcgagcgaggggatagcgagcaggcttcgctatcccctcggctctatttagatggagtgtaagggcggtatttatacggctaatagactactgagcgggggtattcatcccttcgcttgcccccgtagtgaggcgcttcaggtcatcataccgcgcacgcgtatcctgcgccttgacgctcttcttcccccagctgtaggagatggtaagctccaggcgtgggctgtgccaattacgctcgaaggccaggccgttgacctccggattatagctcccgcgcgcgatattcgtattgaaggggtcgcgggcggagagcgtagcgcgtaggttgcccatacgcttgctcaccgaagcatcgacccaccactggcgctggatgcgatagagctcatagagcactccactataataggtcacaccgaggtcgaccgtccaatccgaggggaggctgaagctatggcggtgctggacgaactgggtgttgagcgcggcgctgtagtccgtcatctcgatgtgccccgcatcccactggcgctgggcggcgaggatggtgagcgccagccagctgaacttcttctggctaaccagcgggaggggcaggaccagcagtgcacgcagcgtacggctgtagtcgaggttgtaccgacgcagggtgatcccacccccatacatcgggggtatagcttctacgataggatcctcggtatcggcgtagctgagctccagctgcgccgcacgcatgtaggtatagttcaggctcaggcccctgcgatacgctgtccgcagcccggaattcccttcacgccggaaggcagccgaggctacgctggtatagccaaggaggtcacggtaactcgggcgcgtatagctggaggagtgggtcagggagagctcatggtcgcgagcgggtgcatagcggagggaggcagaggtgagaagctcagtgcccgagcggaagaagtcccccaagccacttcccaagctccccttgcggtcttcgcctgcgatgcgtagacccacaaagccagagaccttcggcagacggaagcccagcttcgtatagccctcgatattccattctcttagcatcagctcgtccgctctactggtgaggcgagagtctaccgctacacggctgacctcggcaccagcgtagagtgtgaagatgctcgagaggcgatgcgcgaagtccagggcgatacgcgcgaagcggttgtcatccttggtcgctacatccatagccccctgatctcggcgcaggtcggagctcccacgcgagccctcggcggtcgtctgtaggctccagcgactggcgcggaaggtatggaagagcgtggcgtagaggttcgaccacttcatacgattgctcatcccctgcgagaagcggagacgctcgtcggcatagttcccgaggaattgtgccccgagggaatgccccttgcccagcgtgaggtccgtacccagaccgacctgatgggagactctgggatcgacacgcaggtcatcgacgactccagaggagagggtcgtggtctcacgatagcgcttattccccagtgtgtaggagacgtaggagcggctgcgaccatagttgagattgacccgagtggagagctgctcggagaagagctgattgtaagtaccgacaaggctggtgaagcccttgaccccctcatcgactcgcgtcttgcgcttgatgttcaggatcggcgtcgtcactccgctgtactcgacacctggctcacggatgagctcgacctgagcgatttcgctcacggacatcccttgcaggagggcgatgacttcgtcttgtgacatacgctggggacgaccatcgatgtagaccgccagctccgagatgccgtagagcttgagcttattggtgccctctatctggaggccagggatgagcttcagcccatccagcacactacccccacgagctttggcgaaggcagcttcaccgaagatgagggtcgagccttcgtagcgtacaaggggagtcttcccctctacgacgaccgcctccagctcgcgggtcagctctacgggaagcgtacccagctggagccgccccgcagggagctccagcgaagggcgaaggatgatggtctgctggacgaaggtggctgcaaggcgatacgtccccgtcgtagccttgaggaggaagtaccccttctcatcggtgatcgcactaaagggcgtgtccgctccgtcggcggtacgcagtacgacgaaggcatttaccagaggagtcttgtccgtcttgctgacgagcgtcccctccagccacgcctcatcggggctttgggctctgaggactcctccaaaggcaagagcgaggaggataagtaggatgtgtctcataggcttatcttctctttgcttaattctctttcccacgtggagtgtgggctgcgtgtgggtttagttgatagagaggacgcgtcctcccgcgtgaagtacttatgctatgtaaaggaaaggataatctaccatatataataaggctctcgcaagaatctgtgtgacagccctctacaaggtcagtttttcgaccagtactggtcggtgaagtgaccagtactacttcacgtcgcgaccagtactgcttactatgggtgaccagtactggttcgatcgctgaccagtactggtcgcttttgccccctgcggtacacagcgaagagatagcccctaagaaggcgcctttaattcggagcaattccccttactacaacgactaatcccccaagccaagagggctcagtctcccccccccttatgaggagggagaaatgccccactgcacctcttcgagagggcatctcgtgggcgagccaccgcaccctaataagcgaaccactattggtctgtgctcggacgactattggtatgggggtcaaaccactattggtttcgggtgcaaaccactattgggttgcacccgaaactactactggaatgagagcgaacaactactgcttcacctttacccaccctattgcttcacgctataccctcggtagacacacgcttgtacgcctccgacaaattggaattcagttgggtatttatttgattgttagtatcttcacaggaaagaaactctaatattaaaattatgtccactatgtcaatcagccaggctcctgacagtcgctccacaatcatgattcgcggaatactgattatggctatcaccctcatctgctttgcctgcaaaaaagcagatatcaatatgagcataagtaaagctgcactatctagttcggcatggtctggaattcaaatagatgcttcaaataaggaatgtgacgctcaggtatacttctctcacgatggtagtatgcgtgttgtactttctgatgcagaagaggtgctattatcttccggaccttatccaacaataataactaacaacgcgatacaagtcatcagtcctctcgagcgagaagaagacaccctttggttcgtctccagctacactggaaattatctggagctaacataccaaccgaagtccccttttgaaagaaggcttaaactaagacgagtcatttaactcctcaccaagagcataatgctctcggtatatctcaaatccataaacaatgtagcgtccccagctataaccacttgacatgtggcttatagctggggacaatgtattgatatttgatgaagcttgaggagaatgagagggctatattttgagactactacaaaagccatatagtagtccttagttcagacaagaggagcaacctatattggtcggcgggctgacctatataggttcgcatcgtgaccaatataggtacataccatcgacctatataggtcagcccaccgaccaatataggttcacaccaccccctcacggaggaagggcaaaaggccttatacgacacggctgtttgccctcagcaagagagacaaagagaccacctgcagagggcacgacagacagcacttcgacacccaccgaagtgggctgaaaggtgcttcttttctataatattttaggatgtcaagctatataggttagttccgtagaactccttacctttgatgtgcaagtacagctcacaaactacattaaagcaaccaacatgaagacaactccattcaccgagatccacaaggccttaggtgccaagatgcatgagttcgcaggctatgatatgcccattgagtatcctacggggatcatcgaggagcatatgaccgtcgtcaagggtgtcggcgtattcgacgtctcacacatgggggaattctgggtcaagggccccaatgccctccagttcatccaagatatcaccaccaacgacgcctctaagctcaaggtcggagacatccagtacacctgcttccccaacgaacaggggggtatcgtcgacgacctcctcgtctaccactacgaagatgagaagtacctcctcgtcgtcaatgccgctaatatcgagaaggactgggcttggtgtcagtcgcacaacgccgctggcgctatcctcgagaacagctgcgacaacgtcggtcagctcgccatccagggtcctctggcacagcaggtcctgcagcgcctgacggatgtagacctctctaccatcccctactacaccttcaaggtcggcaccttcgctggttgccctgaggtcatcctctccaacacgggctacaccggtgctggtggcttcgagatctacttctacccccagtacggtgagaagatctggaacgctatcttcgaagcaggtaagcccgaaggcatccgacccatcggcctcggagctcgcgacacgctccgcctcgaagtcggcttctgcctctacggcaacgatatctgcgacaccacctctcccctcgaagctggtctcggctggatcacgaagctcatccccgagaagaacttccccagcaaggcattcttcgagcagcagaaggccgagggtatcaagcgcaagctcgtcgccttcaagctctctgacaagggtgtaccccgctcacactatgagatcgctgacgcagacggcaacatcatcggcgaagtaacctccggcacgatgtcccccaccctcaagacgggtatcggtatgggctatgtgaagaaggagttctccgctatcggcacgcctatctacatcgtagtacgtggtcgtaagctcgctgccgaagtcgtcaagccccccatgcgcctcgtcgactaagctcgccctcccttagcctgcacgggatgcgggctacacgaaaaagccccagacggctctcccacctcgctcggaggtacgatgagccgtctggggcttgtcttttgtcagtcggggctatcccttagtgcttaggcttctcgctccgcccgtcggcattcttctgcacgaagtagaggacgccgaggaggttgatgacgccgaggcctgctgccataccgacgatcatacgctgtgcctcattaaggaagaagagcgagacgaccgctgcgatgatgacgaggatgatgagcccgatgataatcttcttgatcagctgcatagtgtgtctattaattgttgcacgggcaaagctacgacaattctcccgcactgccgccctctccccacgataaaaaggcttcgccccccgctcacccaaagaggcgagcggagggcgaagtatcgagaattaaaagaagcgtctacgattagtagcggctggctacgacgtcccagtcgacgatagcccagagatccttgacgtggtcagcacgacggttctggtagctcaggtagtaagcgtgctcccatacgtcgacaccgaagaggggacggaggccctggacgacagggttgctaccgttaggctccttcgtgatgacgagttcgccgtcagccttagcagcgagccaagcccagcccgagccgaagagcgtggtgcaagccgtgaggaattcctgctggaaagcctcgaagctaccccacttagctacgatagcctcgaggagcttacccgtaggctggccacccttgttggggccgaactgcgtgaagtagaggttgtgattcaggagctgacctgcgttgttgaagatagcgccttcgctcttgcgaacgagttcttcaagagggagctcagcatattccgtgccttcgatgaggccgttcagcgtattgacatagccagcgaggtgcttaccgtggtggaaggaaagggtctcagcgctgatagcaggctcgagggcattgggagcgtaagggagttggatgagttcgtacttcatctgtgtaattgtttattgggtgtgattaaatcggacaaatgagggagggcattcgccctgtcctatactgaactaacccaattaagtccattattgtttgcttcgggccagcgcactattgtagtagcgggggtcacccgtcacctctttgcccacccagggcggcaggtcgaaggtctcatcttcgctcttcagctccagctccgccaggcagaatccctcgagatgccctgcgaagaggtcgacctcccacgtatgcccgtggtaggggacgaggtagcgcgtcttcttcagacggtgccctccgcacagcccgagaagtgcctcggcatccgccagcggtatctcatattcgtactcatcacgcaccagccccttggcatcggagggcgtcttcagcgtgaggaagccctgatcgccacggcgacgcacgcgcaccgtggggcgtgtcgagtggaggtaaccctgatcaatatgcagagcatcggtagcctcagcgaggaaagccagcgaggtcacgaggaacttacgttcgatctctttcatagccgccgcttagccgatagtcacttgcgtagcgccatagccgtactcctggaaggacgcatcctggaagcggcacgtggggtacttgcgtcgtagctcacgctcgatagaggctctgaggacaccatcccccttcccatggatgaagacgatcttacgcccacgctcccgtatatgctcctgcatcgtgcggtggaagtagtcacgctgatagtcatggatatctgcgctcgacatccctgccgtcgtctcgaggatctccgaagcatggaggtcgatgacgagaggctcatcacggcgaggagcagagggcgcagcctttggagcaggcttcttgtcctccttcttcgtctgcagggcagaggccaaagcagacgcgtccacctcgggctgcgcctgctcagcgccacgctctacgatagggagcatcagcgcatcgtcggtgaagtagtcgttggggcggaaggaatggagcttgaagaacttcgtcccgtcgagcttgaggcgtaccgagagggggttctgtagcttcgtgatccccccatcgtggaagggaagtatctggatggcgagctgctcaaggtcattgagatcagccggggcaaactcctctaagaaggcatcgccgtgaggctcgatcgtacccgtagagcgcaccttatagcccgtacccacggcactcagatagacatagtagagggtgaagccgctgtagttgacgaggtaggcttcgtagttcgtcagcccgagcttagcacgatcctgcgggaggaaagccagctgtacagtcagctcatcctcaccagcacgcaggggacgagcagggcgaggtgcaggagctgcggggcgacgcacttcgttgggggcgggagcagcaggctccgtgcgcccctgacggagcttctcctgaatgatcttcggagggcgaatctctgggatgaaggtgtcgcccgcttcgacgacgacgcagtccttgagcggcgtggggatctcgaagccgtcggcatcttcgacccaagcggtatcagcggtgatgcgagccacacgcccgcccccgaccgtattgaggaagcgcacttggctccctacctgtacattgttagggttatgcatagaggagaggaataggagaaatgacagagtgccttagcctacccggcgaaagagctcaaagaaccccagcgcatagagatactggctgaggagcaggacgagaaggatggagcgcaggacgagtgccatacgctgcgggagcatacccatccctcgcgcgatgaggaaggcgatgggtagcagggtgagctggaggagcgcagccgattcgccagccacgaagggcacagcgagaaggaggacgagcggatagagctgcatcgtcgagaagaggtcacggtgccgcacactctcccgatagtagcggcgacgatagagcaggtagccgacgaagaaggtgacgagcaccacggcatacgaggcgaggggcacggcctcaaagctcttcagctcctggggcatcgggagtgggaaggctctcagcgcaaaagccccataggcctgaagcgccccattccccatcaagagaaggacgggcacgaagagccacagcgggaggatcaccccgatgaggagcgcaataatgggtcgccaagcgatggagcgcaggtggtattggccccagatgatgacagggaccagcaagaggtagacgggagagaccagcgagaggacacctacgagaagcccgatgaagaggctgacgcgtggctggtgcgtatcctgatacgtgccgaagctcaggagctggatgaggagctggaatataagcgcccccgccgagaggatgcccatagagggcgtcgtcgtgaagagcgccaccatgaagagcaccagcagtgggcgctccacacgctcgatgagcaggaagtattccccgatatagatagcgaaggcagagaagcccgccagcaccaagagcccagccagacgataggtccatgccgtcgccacgggaagtagcggcgcgaggacgcccgccccttcgcttacctcacccgtagcaggtgggaggaggtacacaaggaggaaggtgaggagccatagagtgaactccagccaattggtacgctgtcgcgaagaggtgaagcgagacatatcgagaggataactggtgggagggcagagataccctcacgaggagagggaaaagaaatgcctacgagaaggggctacccgttagtagtcatccttctcataggcatctttatctgtgggagctacgaaagcttgaggaggtcttgaccgatatcgcgacggagcgtcttaccggtgtactgcacgcaatcagcgagcttgtagcagcgctccagcgcttcggcaagggttgagccaagacagctggcggtgaggacacgcccacccgaagtcacaagatgacccgagtcatcgcgcgaggtaccggcatggaagagcagcgagtcgaaggtcggtgcgtggggatagctgatggggatccccttagcatagctctcgggatagccctcggagacgaggacaacggtagcagcatactgagaggactcctcgagctgatagtcgccgagattgccacgagccatacgctccaggagctcaacgaagtcagagtcaatacgcagcatcaccgactcggtctcggggtcgcccatacggcagttgtactcgatgacgtaggggtcaccacctgcgttcatcagcccagcgaagatgaagccacgatagtcgataccttcggcacgcaggccttcgatagtggggcggatgacacgctcctcgacgcgctgcatgaaggcttcgtcagcaaagaccacaggagagacagagcccataccaccggtattcaagcccgtatcgccctcgccaatacgcttgtagtccttagcaacagggagtacgcgccagtcactaccgtccgtagcgatgaagaccgagcactcgataccatggagatactcctcgatgacgacacgcgtgctggcagatccaaagcgccccgagaggagtccacgcagctcgcactcggcttcctcgaggctctcgctgatgatgacacccttaccagccgccagaccgtcagccttcagcacatagggaggctggagggtcttgaggtagtcgatggcctcactgagagtagacttatcaaaggtacggtaagccgctgtggggataccgtagcgctgcatgaacgccttgctaaagtccttacttccctcgagctgagctcccttggcatcgggccccacaataaggaggtccgtcagacccgcttcgccatgcagataatcgacgatcccctctactaagggaacctcgggccctacgacgaggagctcaatatgctcccgacggatgagggccgcgatggcagcgaagtccgtcaccccgatacgcggcatacacgtaccgtagagtgacatgcccggattgcccggcgcgatgaagagctgcgagagacggggactgcgagcgatgcgccatgccagggcatgctcacgcccccccgagcccaatagaagaatgttcatacaactgataagataataagtaggatgatggcgagtgggcgactacaggtgatccatgaagtagcgcgccatcgtataattgaggtggacacgatcgaccccgaggacgttgtgcttatgttcggggtaaatcatgtagtctggatacgtcccagccttgacacaggcttcgacgaagagctgcgtgtgctgccagacgaccgtggggtcaatggtaccatggatgaggagcaggcggcccttgaggttgcccgcacggagggagaggttcgtctccttgtagccctcagggttgtcctgtgggctatccatatagcgctccccgtacatgatctcgtagcgagcccagtcggtgacggcaccaccagcagagcctaccttgaagacatcgggataggtcagcatgaggttcgtcgtcatgaagccaccatagctccagccagcgacaccaatgcggtcagcatcgacatagggtaggctcttgaggaagtctacgcccttcatctggtcggccatctcattcttcccgaggtggcggtggatgacctgctcaaaggctgccccgcggtgggctgagcctcggccgtcaacggtgaagatgacgaagcccttggtagccatatagaggtcccagccgaggcaacctgcgtggaagcggttctgcacgagctgagcgtgagggccattgtagacgtagacgatcgtgggatacttcttcgtagggtcgaagttcgtaggcttgaggaggcggtagtggaggtccgtcacgccatcggcagccttgatcgtgccgaaggtgatctcaggattgatgaagccagcttcgggatccttcgaccggtagagggtagcgataggcttgcccgtagccaccgagaggaggcggttctccgtggggttcttcagcgactcgtacgtgtcgaggaggtacttcccatccgaagagagctgcccaacgtgccagcctgcctgtggggtgaggatgcgcgtcttgcgaccgtcgatgctgaccgaagcgatgacacggtcaatggggctcagctgcgtggagctgtagacgatggtcttaccgccgtcagcgaagccgaggaagtccgtgatctcccactcgccacgggtgatctgcccgaggagcttcccatcgacattgtagcgatagaggtgcgtgtagccgtcacggcgcgtctgccagacgaactccttatcacgcccagggatgaagcgcatgggccactggggctcaatgtacttatcgttgtgctccgagaagagggtcttgatgtagtcacccgtagcagggtcgtaggccttgaggtccatatgattctgctcacggttgacctctgcgatgtagaccgtcttgctgtcgggagcccaagagatattcgtcaggtacttctccttaggctcacccgtcttgatgtaggtggtcttccccgaagccacgtcatagatcccgagggtcacgtggtggctgggcataccggccatgggatagtagagcttctcctcggtagccttgcgggtattggtatgtacgaggggataggcagagaccatgctctggtccatgcgatagaaggccagacggctcccgtcggggctccagaagagcccgccattgatcccgaactcattctgatgcacgctctgtccgtagacaagtgtgggcgtgccatcggtcgtcagctgcttcgacgagccatcggggaggaggaggaagaggttgttgtcacgcaccgccacagcatgcttagcacgaggagccagagcgaaggcctgctcagcacggccagcgcgctcgaaggctgcgagctgcttcttcgtctgtggatcgatgaggtaatgcttcttgccgaaggggatgaggagcccctcatctacgacggagaagggcgtgaagtactttgcccccgcgccctttgtcgcctcgccgatgatcgcgaggaactcatcctgactcagcagggtcttctctgggtgagtagctgtcggcgtgccgatcacgaggcgcgtgctatcgatgtacacgtagtcgctaccgagccagcgaagggagcggagtgaggtacgacggagcgccttgggcgagccgagcgtatattcttcgagggtggggctacggtgctgctcctgcgcgggaagctcagtcaccgcaagggtggtggtcgccatagcaagtaaagctaacgtacggatgttcatcattgcttagttatagtgtgagtagtagtcgatcgtatctacaaagatagtcaatgtcccggcttctctggggcactaaagctgataggaagcggagcacttacgggtctcctcgacgcggcatgccacgagtgtaatccccgtcccttcgagctgctgaggcccgacgacggagaccaggtgcatggcgatctgctcagccgtaggattgaaggggacgacgcacagatcctcaggtaccagacggcgcagctcggggagcagtgggtcttcactccagagcaccatcttgtggtcccaattctcctcaagccactggcacagacgctccttgatctcggagaagtcaatgacacgccctaccccatcgagctcgggagccgtgcagacgaagtggatgcgatagttgtgcccgtgcagatgacggcacttgctctcgtgcccgacgacacggtgacccatactgatatcgtggtagcgctctactgtgatcatatctatcctaattagctatacaaagatacggcatcttgcccatagcctaaagggcgaagaccaccccaagacagggcacctcgaccctataaatggcgcacgggcacgatatctccgagggagatatcgtgcccgtggctaatcagtaggtcggacctattgcttacttagcgatagagtcaacaacagccttagctgcagagtctacagtagcagcagcgctgtcaaccgtagcaacaaccgtttcaacgatcgtagcgctgtccttagccgtagagtcctgagcgttctgctcgttgttacctgcacatgaagcaaaagcagctgctacagctacaaatgcgaatgcgaaaaacttcttcatctttctttcttacgttaattagttattgatttcgaattcgtaatgaataacactgcaaatatacggcaacaatccgtttcggcaataagccaagacgtctgagctaccgtgatcgcaggggatttcttccgttacccacccgctgactagcgtcgttgagggcctttttctcattaggcaacctcctgtgcgccttcgcagtattatacagacaaggggctggaagcaccctcagagctgcgtggagtatagcggactcgaaccgctcacctcgacactgccagtgtcgcgctctagccagatgagctaataccccatatatataagtgtgacgagatccgcttgatctccattgtcggtgcaaaggtagtaaatattttatttcaaagtatctttgccccaataagagagcgaaaaaaatctcgcactcaccaccctctttccccacgacgatcccgatgatcctatacaatacgaccttcgtccttgcccctcagactcagcaggctttcctcgcattcatgcgcgaggtttacctccctgcactccatgctgatagcctcgtacagcacccccgcctgcacagcatcgtcccccacgaagagcactccgaggcactctcctatgccctgcacttctacgcagagggcgaggtacacctacaggacatcctctcaaacacggggctccgcctggccgatctcctcaccaagcagttcggcgaagcagtcttaggcttcagcacgatcatgcatgtagtcgactaatcacctgccaccgaactataccttatataaggagcagctatgtcagagcgcatcatcatgggcatcgaccccgggaccatcgtcatgggctacggcctcatcgaggtccgtgggcaggaggcacgtctcttggctctcggggtcatcagcctcagcaagtacgaggaccattacctccgcctcaagcgcatcttcgagcgggtgcagggcctcatcgatgaattccaccctgacgagctggctatcgaagcccccttcttcgggaagaacgtccagagtatgctcaagctcggccgcgcccaaggtgtggcgatggcggcagccctcacgcgcgacatccccatcaccgaatacgtccctatgcgtatcaagcaggccatcaccggcaacggagctgcctccaaggaacaagtcgcaggcatggtacagcgctatctgaagatcccgcaggaccagatgccccgcgaacttgacgccaccgacggcctcgcagccgctctctgccaccacttcctcacctcctctcccctacgctccgcctcagcgggcgccacgaagaactgggcagacttcgtcaagcagaatccctcccgcatcaagggactgaagaaatagccacgccccccaatcctctcccccgagaacaccactagctctgcgcccagcctaccagcgcaaagcaccacgcacaatacccccacacacatacgcttcacaccgcccctcgagaagggcgtagtgcgacctatattggtcgatgagcgaacctatataggtcaccaatagtaagctatattgcttcgcacgcggacctatataggttcacccgctgaccaatataggtttgacaagagactaatacgagttactttttcactcagtgcaaagacgtatatctccctcacgtagagcgccgaaagcaaggggcattttggctcagcaaatcacgagcaagaaggggacactccgtggagctcccatcccctcacaatagaaaagcccaactccatccatccgatgaagctgggacacccttcactaaatattttagtattttccgagcaaaatatcgccctatctcgctgatgcaaagcgtaaaaaaggatggagataccccatcctttttactattaaacccgccttttagtggttatccgtggagacacgtgtaaagggagattaaagtttttcggcggcgcgaaattgcttgtttttgcgcaagaaacttcacacctttgttataccaattcgaagcaatcttatcgtgcctcaaatctaacggtcacctcaccggaccagcgcctgacaaatacacatggattgtacggcctcagctcttcctccttccgagctgaggccgctttctatctataacgtcccgacaccgcacatagttcatcaccacgatccatagcaaagccccgcaccacagctgatctatggtgcggggcttagtccttagtggggagataggggggagcagctacagatgcgcctcatgcgaacgggtgacgactggcctcacatgcacgacggagcgcaggtcacgctcctcggtcagcgggcgctgatccttcgacagatcagggggcagtgcagagcctgggcgcaggatgcgtgtcaggtggatgcgatactcattgccacgcaccagcccatagcgcccatgagccgtcttctcgggagcttcgctatcatcgaagtggcggatggggatcgtatagtagcagtagccacgatggtggaagctgataccatgtgactcaaagggtgcagacagcgagccctccgtcagcgcagcctcttggacagcctgctggaggcgtgcattatccgccttccccgtcttgatgatttggcgtagctcatgctcagcatagtacaagccatcaaagctgaaccagccttcatcgccctgcaggctaagccccgcagggatataggggaagcgcaggatgaccgtggggacaccgccgacgaggtaggccgtaggaggcacggtcgtctcgcggatgtaataaggctggctcttacgtgccgcatcgaaggcagcttcattcgcgaggaaggcagcacgtgggagcaccaccgatgtcttcccgaggatcatgtcctgagtgtagtgagcgaggtactcgccgaagttcgtcggggctgcggtcgaccacttctcatagaggtagctcgagggatagcggtctgcagcagccgagccatcgccagccgtctccttggcgcccgagcgcagaagtcccaacggacggagtggtgccgtatagcgcgcgacacccgtcaccagatagtctgcaggagcactcccccgtgtgacacccgaggggagctcggggtcaccatagacgaagacgcgtgcgagagctggctccagagtcacctgcagctgaggggtcgaagctccgaaggcggaggcaggcaccgagatcgccccctgctcattgagctgggagacggtaagcttagagcccgaagcagtggagagcccatctacgaacaaggtcatgtagcccgagacagcgctcagcggacggccgatagcgatctgctccagcaggggacgggtggcattcgccacgacgacgagcttataagctccctcggggagcgagagattgatgtccttcaactgctcgatagaggtaaccttcacttcacgaagctgggtggagagctgagtcgcctccgaatagaaggcaaagtgaagcgtggagatctggagcatcggatcctcttcgtcgagtccgcgcagggcaatgctccgtggtgcacgtaccgagaggtgcaaggtcgacgaaccttctttaggctggggcttaggcagaggcaagccattatctcgggcactacagccagcgagaagcagaagggagagggacaaggaaagggcacgccgcataggcgcaccaaggggtaatgtgtagctcatgatggatgtgttttggtgtgatagaaggaaggaaagcaccagcctccgaaggactcccaggagggaaggcttcgggggctggtgcgaaagggaggggcagtctcttagacgagctcgtggatgatgagacctgagcggagcttaggctcgaaccacgtcgtcttaggaggcatgatattgcccgagtcagcgatatcgatcagctgcttcatagagacagggtagagtgcgagagcaaacttcatctcaccgctatcgacgcgcttcttcagctcgccaaggccacggataccgccgacgaagtcgatacgcttgtcagagcggagatccttgatgccgaggatctcatcgaggatgagattagaagagatcgtcacgtcaagcacgccgatggggtcgttgtcatcgtacgtaccgggcttagccgtgagtgaataccagtgatccccgaggtagagggagaagttgtgcagccccttaggcgtgtagatctccgtacccttgtcctcgacgatgaagttcttctccagcttctggaggagttcttccttcgtcaggccattgagatccttgactacgcggttgtagtcgatgatcgtcagctggtcatcggggaagcacacagccatgaagtagttgtactcttcgttccccgtgtggttggggttctgcttacgcttctcatcacctacgagggcagcagccgcagagcggtggtggccgtcagcgatgtagagagcgggcatctctgcgaagagctccgtgatgcgctggatgtcggcagcatcatcgatgatccagaattcgtgaccgaagccatcaagaggagcgatgaagctgtagacgggcttctccttggtgtacttagcgacgatcttattgatctcatccttcgcggggtaggcgaagaagacgggctcgatgttagcgttgttcacgcggacatgcttcatgcggtcttcttccttatcgcggcgggtaagctcgtgcttcttgatcacaccgttcatgtagtcttctacagcggcgcagacgacgagaccgtactgcgtcttgccattcatcgtctgggcatagacgtagtagttctccttagcgtcctgtacgagccagcccttctcacggaagaggcggaagttctcagcagccttctggtagaccttctcttcgtgctcatcggtgcccacggggaagtcgatctcggggcggatgatatgatagagagacatctcattgccttcagcctcagcacgggcttcttcgctattgagtacgtcgtagggacgagaagctacacgctctacaaggtcctgtggaggacggataccacggaaaggtttgataatagccatggaggtaagtcttattatctaaggtgggaagatagtgacgtaaggtagccggactacttattcaggcggaagcgttcgttgccttccttgatgaagccgacgatctgacgagcagcagccagaccagcgttggtgttggcttcagacgtctgagcacccatcttcttgggggtcgagaagtagcgttcgccagcagcagcttcgaattcttcgtgagcgcctggacggatatcagcgaagtagcggaggtcttcgcgttccttgaggagggcgatgagctcgggttcgttgatgacttccttacgagcggtattcacgaggatacccttcttaggcaggaggctcacgagttcgcgaccgatagagcccttagtctcaggcgtagcggggatgtggagggagacgatgtcgcaggtagagaagagctccttctggctggcgacagcgtgtacaccttccttctcgatgacttcggcaggcgtgaaggggtcgtaagcatagatatccatgccgaagcccttagcgatgcgagctacgttgcggcccgtgttaccgtaagcgaggaggccaagcttcttatccttgagctcagtaccagaggtgccgttgaagcggttacgtacgccgaagaggagcatagcgaagacgagctcagcgacagcgttagcgttctgcccaggagtgttcatcacgcatacgccgtgagcggtagcggactcgaggtctacgttgtcatagccggcaccagcgcggacgacgatcttgagctgcttagcagcgtcgaagacctcggcatctatgatgtcgctacggatgatgattgcttcgacgtcggcgacagctgcgaggagctcggccttagtcgtgtacttttcgaggaggactacttcgaagccagcttcggtgaggatttgcttgataccagctactgcgggagcagcgaagggtttttcggtggcaataagaacctttgacatgatgtatagatgtgtatttgaagcgtgtgagatgggatagagataagcgacggcacagaccactcttcgcccacagcgatgagggtcggggtggtctgtgccgttacgtttatcttcttaaagcgagagggaagcttagtgcttacgttcgaattccttcatcaggtcgatgaagaactggacgctgctcttaggcagagcgttgtagagagaagcacggaagccacctacagagcggtgacccttgaagctgtatgcaccgcgagagacagcgaagtcgtagaattcggattcgagctccttgtactcgtcgttgaggacgaagcatacgttcatgatcgagcggtcttcggtattgacggtaccacggaagaggcggttgcggtcgatttcatcgtagagcatgccagccttttcgaggttcatctgctcgaggaccttcacaccaccgagttccttgtaccacttcatcgtctgcagagctacgtagacggggaagacaggaggtgtattgtacatagagtccttgaagtgcgtgtcgtacttcagcatcgtggggatgatgcggttgtcttcgatgtgaccgacagcatcacggcgtacgatgacgaaggtaacaccagcaggagcgatgttcttctgagcaccaccatagatgaggtcgtacttagatacatcgacagggcgggtgaagatgtcggaagacatgtcccctacgagacggacctttacatcgggatcgtagcggagctccgtaccatagaccgtgttgttggtcgtgatgtggaggtagtccacgtcatcgggtacttcgttcttttcccatggcttggggtaccagatgtagttgtcatccttagaggagaaggtgatgacctcaccgaaggccttagcttccttagcagccttgtttgcccacgtacctgaatcgacgtaggcagccttcttcttgaggaggttcataggaacctgtgcaaactgcaggctggcaccaccaccgaggaagagcacttcgtacccctcgggtacatcgagcagttccttcatgaggttacgtgcttcctccatcgttgcagagaattccttagcacggtgagaaacttcgaggatagagaggccagtgccctggtagttaaggactgcaccagcagcatctctgattacgctctcgtcgaggatcgatggcccagccgagaaattgtgcttcttcataagagcagatatttgtggatgaatatttataggagcgtcgatatgcgagcagccggcgacctgcacgctgcgacacgctgcgatcatcgcctctgctcgtagcaaagttatcaataaaaagatgaatagcaagcccttcgcttagcttttatttaccccctcggaagcaccccagataaagcattagaagatagcttaataaaatacttaatgatgcgcactcgcaccctccttccccgccacttcggtgtgtgatattgacaggataagcgctaccctatccccatatcacacctacaaatcaagacaaacgacagagaacacccacctctcggcggctcactttcgcacaaagcaaagtcggctgatcgcatcaaccgcccccttcttcgcgcccttagtttgatccttcgagtcacttgagactgttgccgcgagtccggccctctatttagggtgctgaggcatcgcacgcccagccccccgatatgcctctcctaagtgataagcccctgcgccttatcgcgcgtattcctcttatccagcggagagaaaaatgctgttcccgtgaaggaaaaagcgccttcacgtagtggtctttccgcatctatgtacgtagtcttaaagaccaggcacgtaaatccaactatccacgtacgtagatttatcgtccacgcacgtagcccaaacttatctgccactcgtccacaacttttatccctacgcggagcaacaacctaatagaggtcacttcacaaagctgtatagctttcttcaccatcctacatagctctaccctcgcacccgacaggcataaataaaagcacccagcagatagactgcatcgtgtctatctgctgggtgctttttagccctcctatggatatgcgaggcgaagggcttagcctaagacaaatgtccagtcgcgatcggtcgactcctcgggcgcgaagacgaagccctcgggagtgagcatacgcagggcttcctcatcctcgaggcgctgacgaatgacttcgcccgccatcgccccacgcgccatcttcgtgtagacgacgatttgcttgaggcgacctgtaggctggcgcacgaggaaggtcggcgtgatgacacgcacagcacgctcgacctccgcccagtggaagagcccacgcatctcgtcactggcgaggaagaggagcgtaccaccagcacgcttcacctcctcgatgaggtagggagtcagacggtcacgccagtagtcgaagagccgcccatcgaagagatctgggagctgtaccgcaccctccatacggtcgtagcgaatagccgtctcgggcgagagcagcccgtagacgaaggaggtaatgcgcagatgctcggccgcataagcccagtcctccgctgtgaacgtagagggcgagagcttacggaagaccatccccgtgtagctcagcgctgcgggcatctcggtgacctcgggatcgaagaaggtgcgcagacgggcatagacctcgtcccgaagcttgggactgagctggagcatcgaggcaagctcctcacggctgaggcgaaggacagaggccatgatcgtgcgcgcctcctcgaggaagcggggcgaggtcatcgtgagaccacgaggcaccttggcctttgtcgcgaaggtcttagcgggggagataagtaggaacatacgtaggacaagcggagggatagtaagagagaatgatatgagaggctacctcggcacacgggcacgtagcacctcacgcttcccgggagggccagggaggcgctcgacgaggaagccagcacgctggaggcgacggcgcacctcgcccttggcgcagtaggtcgtgagtacggcttcggggagggcaacagcgaagaggcgagcgaagaggtcctctgcccatagctcaggctggctatcgggggagaaggcatcgtaatagatgaccgaaagcccctcggggaaggtgcattcggtgaggtcgccgtggagcttctcgatggtaaagaagggactaagcgccaccgcctcaccccacggagcggtatggagtgcgccgagggcttcggcaggatccagtggccccgtcgcaccctcatagtggagggcttcgtagacctcggggccgacgggatatttctcgatggaatagtaatgtacgggcctgcgctctgcctcggcccgctgccaagtgaggagcgcattgagccctgtaccgaagcccacctcgaagagtctgaggggctccgtcgcaccttgctccgcacggagacgctcctcgagtgccagacctatatatatatgtaggctctcctgcacggcgccatgcgtcgagtgatagtgttcgccgaaggtcggggcaaagagcgtgaggctcccgtcctcggtcgtctcgacaaggggcgtagcgtcgtggctcatcggctgagtgtggggagcaaaggtgcagcgagctgccagagggcgatacctgctgcgacgctgacattcagggagtgcttcgtgccgtgctgggggatctccagcgaggtcgtgacctcggccatcacctcatcacgcactccgcggacctcgttgcctaagacaagggcatagcgcccccctggctgaggggcgaaggtctccagcgacacgctgtcgtgagcctgctccagcgccaggacttcgtagcccgcagcacgaagctcgcggacggcctcgacgctgtcggcagcataagtccaagcgaccgaatcctcggcaccgagggcagtcttgtgaatatcgggatggggaggacgagccgtgatcccgcagaggacgaggccctccagacggaaggcatcagcggtgcggaagaccgacccgacattattcatactccgcacatcatcaaggacgacgacgatggggagcttcgtttcacgacggaaggcctctgtcgtgaggcgctccatctccgtgatctttagcttcttcattgcctgcaaaagtagtgaactcccacgtatcccctacttctatctcctgattatggccgactacttgagcgtgatctcatagccttcagcgagcttctgcaaggccgtagcaggcgagatattcatcagagagcggctgcacctatcatagtagaagcgagctcgcccactctgagagccatctggcgaaggatagacaaccaagagcccagagagctcatggggagaagtgtcgtcataccgattgggccacgagaaggtcacgcacacggagagcatcttctcacgagggtcataagcgatcgactcctcctccagagtacataactcttcagagctattctgtaaagagatgagcttcgccagctctttactcatcttctgagcactacgatgcgccagctccactctccccttcgtcgcctttggtgtaggtctatgaggcatcacgacacgccgagacgccaacagctcgagccacctatcgaggcgatcccttacggccttctgatgacgataatccgtcttgagaatctccttgattacgggtagtagatttcccttcgggagaagcgtcagatactccttgaggacgcgccaagtatgctcactccagaagcgatcaaggttatcatcactcctaaatatgaatagcgtggagccattgttgtagagatcgagcaccccgctgacaccaagccactcgtccccacgcttgaagtacgagccagcaagatagcggctatctggatacgcctggatatagcgctcgagtccggcgatatagcttgcctctgtcggatacgacttgcttggagaaattctcagagcataaggcccatccatcacccaatccacccgctccaattcgatgaagtcagagagttccctcgagatatagggatagaagggcttgtagagctgctcggaggcatatacctgcacctcatgctccctcacttctggggcgatacattcataggcaagccccacgtccgcatacgggatacgcttctgggcgagctgatgctcctcttcggagaccggcctaccctcatacagctcctcttcgatcgcagtggctatcttactcaggctatagcgacacgcggtgatccccttatgcatctcatagaccagccgatccgccagcacaggcgatgctcccttgacacgacggagggtattctcctggagggtcttgacctctacaagtagctcgtcacgctctcgcccaagagaatcgagggtatgcgttcgctcacgctcggcctcagctccccagcaaagcgccaagagcatcacggccactaaccaatactttctcattgtcttatccgcttcgttcatatcgcatactgtcagcacggggcgaagcatcggatcaaagatacaaacactcacccatccccctaccccgatacgacgaagcaccatacagccaggagggcgtgcatcgtgcttcgtcgtagtcttgtgggaggggaagggcgggtttattccaggccgtcgcaggagagatgcatcagggagcggctgcagctatcatagtagaagcgagctcgcccactctgagagccatctggcgaaggatagacaaccaagaggccagagagcttatggggagaagtgtcgtcatcccgattgggccacgagaaggtcactcgcaccgagagcatcttctcacgaggatcataagcgagcgacttctcctctagggtaaatggctcttcagagcgcccctggggagaaataagcttagtcagctcttcgtagatcctttgggcggtacgacgcaccagctcttcttggggcttcgtcacctctggagctacactacgcggcatcgcgacgcgacgtgactccaataactcagcccagggcccggtgagcgaagcgagacgctcattgacctccttataagggtgacctatcttgcggatctccttgatgactgggaccagatttcccgcaggcattagcttcagatactcctccatagcctgccaagtgtactccccgacaggacgatcaaagttttcacccgccccaaagaaaaagagttgcgaaccgtaattgtagcgatcgacaatcccctcggtgactccgccctcagctccaccacggctgaagtcctcagtaagcaggtagcggctcttgggataagtctggatatagcgctccagtccgacgatatagctcgcctctgtgggatatagcttactcgggataatccccgacacataggtatctctgatattccaagctacccgtgccaagccgataaagtcgattaattctttagagatatagggatagaagggctcgtagaagggctctgacacatacactctcacctgatgaggactggcctggctcgaagcacagtcgtaggtaagcccaagcgcttcgtatggcttacgcaattgatccaaacgatgtgccttctcagagacctttcggtcgccatagatgaagtgctcgatagatgtcgctggataccacagatcataagcgcgaccctccactacataaaacgtctcatagaccagccgatccgccagcgcaggagacgcctccttgatacgacggagggtattctcccgcagtgtcttgatctccgaaaagaggtgatcacgctctcgctcgactgaagaccgacttgggactctgtcacgctcggcctctgctccccagcaaagagccaagagcatcactgccactaaccaatactttttcattgtcttatccgcttcgttcatatcgcatactgtcagcacggggcgaagcatcggatcaaagatacaaacactcacccatcccccctaccccgatacgacgaagccccctgctactcggtcggtagcagggggcttcgttcgatataattacatagggcgggcttattcgtccagctcttcggctccactcttgagctctcggacgaaggcgggatccgtcatcagcggagccagtgccgcctcagtctccgccttgtagacgaggaagctctggagcttcacagcgcgcaggagggcagccttcgcctcttcgtgacgcgagagacgggtgagacagatcgccttgaggtactcgaccttgccgttggcaccgagctgattgagcaccatcagggcacgctcatcttcctccataccggccagcgccagtgcgccattgtagtcggggtacttacggaggtactcgagggcaccacggtagtcacgggcggccatacgctccagaccgagcttgtactcggcagccgcctcgggcttctcgttgaggcgatcgatgagggtagcgtccacgaggtcattgatacccgagatgacgaaggtcagggtatcgacaccacgctgcatccacgtgctctggtcgatagccgagatacgcgagtcgacgatgaccttcatacgcttcttcatctgtggggtcacctcgaggtcacggctatagagatagacgaagtccttatcaggggtgacaccagcttcatactgcgtctcctcgatgagggggaagtggacgatgtggcgacggtaggtatcggcgttcgtgcggcgactctcgttgtgagcgatagcacggaagttgtacgtatgctgggctacctcgagggagtccttctcggtgaaggacttattctcgatggagtccatcgtccagccacgctcgaagagcatacggaacttcccagggacgttcgtgctgtcgagctgacgctcgccacgtgccagataggcggcacggcgctcggggctatagagcatatcgaagcccttacgctggccgacgctgtcgcgacctgagagttcgtcacggtaggccgccccgagcatatcgagggccttcgcgtggtacttggtgtcataagcccctgcacgagcagcattggcattgaggtagcgctcctccataatacggcgccagcgctcataagccagctgcagggagaactgacggcggtaagccgaatagtagtcctgctgcagacgtcccatgaatgagcgatgggccttgcgattgaagaagacgctatcgtacttcgagggatcgacgatgctctcctggaaggcctgcagagccttctgctccttgtcctgagccgccttaaattcacggcccttcagcacgacagggggcagcgtcatcgtcgtgtcctcggtgaggaggcgtggggagaggacgacctgatagcgctcatccatcagcgcacggggtacggtgacgaggaaggtgaggttgatacggcccttacgcagggtggagatcttcacgcgggggcgctcagcggtgacggtcaccgcctcgatgacctgcgtcttgataccgtcgtccttgggcttctcatcgcccttggtggcacggcgtatcgtgtcggccttctgcgaataggtgacgatctcggagagcatacctgtgcggcctgccttctcttccttgtcggtaggcaggtaggcatgggggcgtgccgaggtgaagtaaactttcttcgtcagcggctgagcacacgagccgaggacgagccccgccaagaggacggaggcaagggtatatattttcgttcgattcatctatctggagattgcgttagaagacataggccaggctcaggccgatacgtgagggcaagaccatgacgcggctcttatctgccgtacgcaccagcttagcgctgtagcgctcatcgtagcgggtccatacaccagccagaccgacctctgcctcgaggttccagtggggcgcaagctcatagctgtagccgacagagcccccagcaccgacgaggaagccctcagagtacgtcctggagagactgcccccgccaaagcggtagaccatcccgagagcatgccccgagacgaagaagccacggttgtagacgcccttcgtccagtagcgcagggcagggctgaaagccgccatctcggcgtgctctaccgagccccacttcaggcgctcgctgaagccgacattacccagatgaccgtagagggtattgataagcccgacgggcatggggagtttgaagaggcctggacgagccgagaaggagagctggagcgaagtgcgatcaccgagcgccaccgacggctccacactgatggtccccgtaagtagggcggggaggttggcgctcacggcgaagcgctgtgcatgtaatccctcagtcgcacccacgaaggcgaggacgagtaggagggctattcgtctgatcatttgctgaacgttctgataaaatttcattgggagtgagctatttccaagagagtggacagctcaggagtcataccaaattgggtgcaaagatacgcaatatcattttttcacacattcacacttcattccgaattatcacagttccctgtcactacaccccaagaggggcggagtaaacggatgaatttggcacaaatcgaatgagaagactgggggaagaagaggcgcaccaagcaggtgcgaagcactatgcggatgcgtcaccgccccatagtgctctgacgctgaacccatagagttcagggcacgagccaatagatgaacggacgaccgcccccgattggtacactccccaccccacacggattaccccacacgaagcagacgagtaaaaataaaaagcacccgaggcaaaccacccgccagcacgaatcaataaagtagctggcgaataaaaagagtgtggggcagtatccaagcgcttggatactgccccacacttggggtacgagttgcctataaggctatgctgtaggctatatccagaaggaaggaagcatcacgaaaacgctgcgtcttaacccaataggactgtcccgcataataggagtctcccgcatagctgtgcttagcacgatagaagagcaaaccaattcccagacgcaggtagctcttactgctcaaagggaaactccagccgaaggtcggagccatccccaacgtgtaatgagacttcacattactctctcgaacagccttactggggaagagcgtccagtcatcgatctgggctcccagacgaagagaaagatatcctcctttgttaaaggattggccctcctcccggcgagagaaataataacgtggagccagctcaagcagcggagttaggccatcaaactggaaggacttcgatgagccaccatagccaagaccgagtccgaaggcggctcttcccccaagctcaagatggtcggtcagcgcataatcatagctcacgccattcatccccccgagtaatatcccgaggcgacctcgtgagacttcttgcccctggaggctatttccccagacgagcatcataagaccaaaaagtagagatcgtacattcatatttttaccatgttaagttatcaccatgtgagtagaaagtgcagtcgccagcatcctgatttttcacgggtaggcacacgactttaccagagctgaagtgggcattccctccgctggagggggagccgtccctgcgcccacaaagatatacaactaatcctataaaagtggagggagtagcttcccgccaccgaagcccgtacaccttccctcaagcgccagccgaagagcaccgcccaacacagagcagcgacaagctattatacagcaagatagcccccctcaagaggtgttaccaaaaaccctctcgcaagggggcaaaaaacgaaccagtactggtcaccgatcggagcagtactggtcgcgccttcgaccagtactggttactaccactgatcagtactggtcacatcggcgaccagtactggttgattttctcctcccgcatagaataccgcgagtgcagctcatcccgatgcagttattcgcccttgagctctggtgaattccaactgtgtatgatgcgtcagccctgaggtcgggagagcgacctatattggtcagcgggcgaacctatataggtcgtcatcgtgacctatattggtcggtgcgtcaacctatataggtcagctcagcgaccaatataggttcataccacccctctatataggcccaagagtggactacgtacaaagcccactcagaagcgaggagaaaagcctgtgggagggaatagggcgggatgcagtacctttgcaggaaaagacagaagcaagatatgaaccaacttgatctcttcctgggggccgtcgtcctgctcttcgccctcgggggactcttcggtggcgctgtacgccgcgtcatccagatagccgcactcatcatcgccttccgcgaagcgtggcgcttggccccctgggtcgagagcgtgctgggcgggggtgacgggcagagcatcggtggctggggcttcatcgtccccctcatcgccttcgcccttatatatatcggtatccgcctcgtggggaactggttcagctcgctcaccaagggcacgttcctctccgtcattgaccgcatcgtcggcctcgcgctgggcctcctcgtcggggtctacctcatgggctatgcctgcctgctcttcgagggcatcttccccatggagcagtacaacgccagcagctccacgcccccgacgacacgccagtcctcctacctctatccccgtctcatgcagtcggtagaggatattcgccatgctaaggcgctcctcttaggagacggcgacagcaagaccaccgacaccgaagctcccgtagaagccacccccacaagcaaatgatagacaccctcgccatcatccatcgctactaccccgagggtagcgacatcgagcgcgtactgcgccagcacgccgaggacgtcacgggcctggcccttgagctcgtcgatgcacaccccgagatggggctcgaccgcgagttcgtcgcagaggcggcgatgctccacgacatcgggatctatcagacaaatgctcccgagatcttctgcacgggcgaagctccctacatcctacacggctacctcggtgccgagcttctgcgctcgctgggcctgccccgtcacgcttgggtcgctgagcgccatacgggtagcggactcactgccgaggagatcgctgcacgcgccatccccctccccccaggcatctacacgccgcagtgccccgaggaggagctgatctgctacgcggataagttctactccaagaccaagctcgggcagcgcaaggctctggagcgcgtgcgtagcggattcagcaagcacggggaagccgctctggcacgcttcgatgccctacaccagaagtacggcctttagccccaggcatctccccatattttcctatttttgtactcaagcaaaaacaatctctaatcaatcattttatatggctactacagcagacttccgtaatggtatgtgcctcgacatcgacgggcagtactacttcatcgtcgaattcctccacgtaaagcccggtaagggtcccgctttcgttcgctcaaagctcaagaacgtcgctacgggtcgcgtgcttgataagacatggaatagcggggtgaaggtcgaagaagtacgcatcgagcgtcgtccctatcagtacctctacaaggacgagatgggcctgaacttcatgcaccctgagaccttcgagcagatctccatccccgaagctgtcattgatggcgtccagttcctcaaggaaggcgataccgtcgaagcaatggtgcatgcagcctccgagacggtgctgacgtgcgagctccccgctcacgtcgacctgcgcgtcacctacaccgagcctggcctcaagggtgacaccgctaccaacaccctcaagcctgcaaccctcgagacgggtgcagaggtacgcgtacccctcttcatcaacgaaggcgaactcatcaccatcgacacgcgtgatggctcgtacgtaggtcgtgtgaaggaagcttaagcgcccccccccttcgcccttgcggcaataaagaatcccgccccgacttctcccatcaagagaagtcggggcgggatcttttgtatccttatatatgctggcgccttagtcgaggagcgaggtgaggtgctctgcgtaggcgtcccagtcggtgatcgtgtggcgtgctaccccactctcgatagcggcgcgagccacagccatagagacctcgacgatgagacggcggtcgacaggcttcgggatgaagtagtctggaccaaaggcaaggcccgtcgtcccgtaggcttcattcacatagtcgggcacgggctgcttagccagcgcagcgatagcgcgcgtagcggccagctccatagcgccgttgatagccgtagcgtgcgtgtcgagcgccccacggaagatgtaggggaaggccagcacattgttgatctgattggggtagtcggtgcgccccgtgctcatcagcacctcggggttagcagccttcgcctcctcgtaggagatctcaggcgtggggttcgccagcgcgaagatgatagggcgtgcagccatcgagcgcaccatctcctgcgagaccatgtcgcccttggagagcccgacgagtacgtcagccccgcgcatcgcatcggcgagcgtatggagctcggtgcgtgtggtggcgaactcacgcttcatatcattgaggtcggtgcggtcgaccgtgatgacgcccttcgagtcggtcatcacgatgttctgatgcttggcacccagatcgcagtagagcttagcgcaagcgatggcggcagcaccagcaccgctgacgacgatacgcacgtcttcgatgggcttgccgacgagctccagtgcattcagcaggcctgcacccgagatgatagccgtaccgtgctggtcgtcgtgcatcacggggatagagagctctgccttcagacggcgctcgatctcaaagcactcaggcgccttgatatcctcgaggttgatggcgccgaaggtgggagcgatagccttgaccgcagcgatgaacgcctcaggatcggtggcatcgacctcgatatcgaaggcatctacacccgaataaatcttgaagagcagcgccttaccctccatgacgggcttgctggcgtcggcaccgatattacccagtccgaggacggcagtcccgttggagatgacgccgacgaggttgcccttcgccgtgtagcggtaggcagcgctggggtcttcggcgataaccaagcaaggctcagctaccccaggggagtaagccagagagaggtcataggccgagctgtgcggcttggtagggacgatagcgatcttgccggggcgtccctcttcgtggtagcgcagcgcggcttctttcgtaatctcggtgggcatatattcggatggataagaattattagacttgtgaaactacaacaagctaagtgggagaatgttccacattcattagctcgacaaagatacagatagaaaatcacgcaggcgactggagacaagcgacaagagagctgacaatcccccccgctactcgccccaggcacttgacacaaggagcaggccaaatgcaagaagccctacctgagaggtgatgacctcatcaggtagggcttctgtttatgcgcttaagtagttacgctggagagcgccttactttaccttagcgacgatagccttgaaggcttcgggatggttgacagcgaggtcagcgaggaccttgcggttgatctcgataccctgagcgtggagagcacccatcaggcgagagtaagagagaccctcgagacgagcagcagcgttgatacgctggatccacagagcacggaagttacgcttcttgttcttacgatcgcggaaggcgtaggtcagacccttttcccaagtgttcttggctacggtccagacgttcttgcgagcaccatagtacccacgcgtgagcttaaggatgcgcttgcgcttagcgcgagaagctacatgattgactgatcttggcatgatgtttcttctttgtgattggtagcgatctgcctctctcccgagagagcggagagcagatacttgattggcttacctctctgttactgaaataatcgttgtgctaacttgccgtttagcggaggcggagaagttccttgacttcgcgtacgtctaccttgtccacagtggtgaagtaggtgaggttacgcttctgcttcttcgtcttcttcgtgaggatgtgactcttgaaggcatgtttgcgcttgatcttaccagagccagtgagcgcgaaacgcttcttagcactggagtttgtcttcagcttaggcattttctttcttgtttatataagttatttcattgacccagctccactgacgcagcctatgcgcgaggtgctgggatgggggatacgttgattagtcttcgtcggaggcgtctgcagcctcttccttagcgcccttcttaggggcgggggtagcggccttcttaggggcgagcatgatggtcatgcgcttcccttcgaggacgggcatactctctacgcgaccgtagtcctcgaggtcattagcgaagcgcaggaggagcacttcaccctgatccttgaagaggatggatcgaccacggaagaagacgtaagccttgaccttcgagccttcgctgaggaagcccttagcgtgcttgagcttgaagttgtagtcgtggtcatcggtctgaggtccgaagcggatctccttgacgacgaccttgacgctcttagccttctgttccttctgcttcttcttaagctggaagatgaacttctggtagtcgacgacgcgacatactggaggattgacattgggagagatctccacgaggtcaagctcttggtcgttagcgatacggagagcttgctgtatcgtatatactccctgctctacattgtccccgacgaggcgcacttcctttacgcggatagcctcgttgatgcggtactggaacttttgtttgttgtctactgccattcagtatgtgttgattgtatgcttagcgagtgaggtggactacttagcttcggcctgccaggcgttgagctgacggtgtacctcctcggcaatttgctcggcaaaggtagcaattttcactgaacccttatcaccctcaccttgcacgcgtacagatacttcgccttcctgggcttccttttccccgacgataagcatgtaggggatacgcttgagctcattgtcacggatcttacggccgatcttctcgttgcggtcgtcgacctgcgtacggatgtcctgagcgttgagcgtggcggctacctcgtgagcatagtcgttgaacttctcactgataggcagcacgacgacctggtcaggcgtgagccagagggggaagtgccctgcggtgtgctcgatgaggacagcgacgaagcgctccatagagccgaagggtgcacggtggatcatcacggggcggtgcttcttgttgtcggcacccgtgtactcaaggtcgaagcgctcaggcaggttgtagtctacctggatcgtaccgagctgccagcggcggccgagggcgtccttgaccatgaagtccagcttaggcccgtagaaggctgcttcgccgtactcgatcttggcgggaaggcccttctcagcacaagcctcgatgatagcctgctcggcgcgctcccaattctcttcgctaccgatgtacttctcgcggttcacctgatcgcgcagagagatctgagcctcgaagttctcgaagttcagcgccttgaagatgatgaagatgatatccatcaccttgcagaactcctccttgatctggtcggggcggcagaagaggtgcgcgtcgtcctgcgtgaagccacgtacacgcgtcagcccgtggagctcaccgctctgctcgtagcgatagaccgtaccgaactcagccagacgctggggcaggtcacgataggagtgagggccgagagccttgaagatctcacagtggtgagggcagttcataggcttgagcatgaactcttcgccctcctgaggcgtagtgatggggcggaaggagtccgcaccgtacttagcccagtgaccggaggtgacgtagagctgcttcgagccgatatgcggggagatgacctgctgatagccgaactgcttctggatctgcttgaggaagtcctccagacgcaggcggagctgcgtaccgcgaggcagccacaggggcagccctgagccgacgttctgcgagaaggcgaagaggccgagctccttaccgatcttccggtggtcgcgcttcttggcttcctccagcatcgtcaggtactcatcgagcatcttcttcttggggaaggtgatcccgtagagacgcgtgagctgcttgcgcttctcgtcaccgcgccagtaggcaccagctacgctcagcagcttgatcgccttgatatagcccgtattaggcacgtgagggccacggcacaggtccgtgaagtcgccctgcgaataagtcgtgatcgacccgtcggggaggtctgcgatgagctccagcttgtactcgtcacccttctcttcgaagaacttcgtcacctcagccttcgtgatgtcgcggcggatgataggctccttgcgagcagcgaactccgccatcttagcctctatggctgcgaggtcggcgtcgcgaagctgcacgccttcgcccaggtcaatatcgtagtagaagccattctcaatggcaggaccgataccgaacttcacaccaggatagagcgcctgaagggcttcggccatgaggtgcgcactggagtgccagtaggcgtacttcccttcgggatcttcccacttatagagcttcagctcggtgtcctccttgaggggacgcatgagatcccagatctgaccattgacaccagcggccagcacatcctgctgcaggcgggggctgatgctgccagctatatcccacgaggtcgtacccacagggtactcacgctgactgccgtcagggaacgtgacttttatcattgagctcattcttatacagattgattacttagtttgtcgtgcaaaggtacgataaatacgataaataaagggacttatccacgaggagcacaaggcacatcgcctgcgccctccacaccccaccgacaaaaagaaagcgggtatcacttcgagagaagcaatacccgcttagctggtgaccccggtgaggctcgaactcacgacccagtgattaagagtcacttgctctaccaactgagctacagagtcattctgatctcgaccgtttttcctcgccttggtgagcgacggcttttgatttcggctacaaaggtaaggcaaactttttatttgtgcaaataccccaccccatacgccctcccagcgggcagactaaaaggcaggatcaaagtcacgtactccagataggctccgaagcccagtcgtatgggaagcccagctttgagggagagatatcctgatgagacgcaaagaatgagatcatctgatgcttgaaagcctctccagcacctataccattacacatatagagcatcgacgtgacaatgagatagggcttcttgcgctccaccttagtaaggtgagaattatgccatgcccctttagggttatccaaactcatcggcatcttcaccatcgtccggccaaatatgcgcgagtgatgtgcgagcaggtttctcagataagtaacagcttcgagccagctggagagttcgctatgaagattcaatccgaaatcattggctatacgcgccttctcggggagctgatgctttaagttcttatatatcttcgagagtgtacccaagcttgcaagctcaaagatgacccacgagtctggctgctcatcgaaatcaagacattcttggccataccaaatgccatatttctctttgaagtctcggacaaaaggctcactactacgaagaaactctaacttcagagtagccatctgctttttgaagacatctggatcatcaaacaatgaggcgtcaagataaaacagccctccataggattgtgagaggtagtaaatcatcttcgtcctcagcgctatctctatggcttctacagcattaaaaagtatcaaccttagctctcggtcgtactcatagcgagcaatgacctcctcaaagcacgcatcatgcttaaagatatgcctctctttatcggtttgcatatcccaccaatatccttttagacgatagtagctgatacgactcagtagatgatgagccaactgctcatctcccaccctcatacctcgctgctttaagagagctatttgttcggctatagagcgtgattccttattagacataaaaaaaatgactcgccggcagatcttacggtatgccaagcgagtactgttatcgttagtgtaggcaaaacctacaattctgttgctatttttcaatgcaaagttatacttttatttgaacatacaacagacccatcaacggaacattgattaatctgggtgctcccccgccttaggctgagctaaggcgggggagcaccgtgagtgaagcggctaagcgccgaaggcggaggttagatacctacatgaccacctgcgcccgtatcgcctgcacctggagtcccctcggcagggtggccgccttccttcggctgtgcgcccttacccttctttcccttggccttcttctccagcgcgatgcgctcgaaggctacatcatccagacggaagaacttaggattggggcgaaggcgtacacgtgcccccataatatgcgccacggcactaaactcttcctctggagcagcagccttacagcggagctttggagtgaggcgccccagacggccgaactcaacagcttcaccgccagcgaccagagtgcgtgctgtatcggcagcaagattgaggatggatgccacctccatataattgaaggtcgtgtgccctgctaccatatcgcagaagcgatcaaaggagacgcgtccacgaggatgagctgtagcgatcgtaaccttcttaccggcgaacttgccgagtttcatttcggtagcacggagtgtgtaaccgagagcttgctttgtggttcccataatagagtccaaataaaaagtgaataaaacttgcttgtgccccctatcttttggaggacactgcaaaggtagagcacccaccatggggtcaaagtcatcttttttcactttggtctatttgctccttagataggtattcatcggctactattcggacacattggcggagatttgacggacaaagatgagagagacatgatgcgagcgaggcacaataaagccctgcatatctaagtctgcatccataccatataaatgtaggcacatacgatcaagctcttctacatcgaagagaattcacctgacatcaccattttccttagccccataaattgaacaccttagcccagagatttgagtaaacatccaaacagaattgagtaaatatacggacgagattgaatccccctccaattgacttaagtagatgcagacaacgtaatcatcttagcgtcatatctcgagcttctcgacctgcgaaccttacttactggactgcaaaagcatgtctatgatgacgctcggaagcgggcatccatccccaaacatcaagtgtacaacaacgccgtgcagaccacgtacagaggtagatcgaatgagcacagggctaccagcctttgtgaaggcattccaccctcacaaatcttttgtcgtggacacaggaggtgtgtcaatagaagacttcctgagctgtgacatcgaggccctattaaattaaggtgcactaaccctgcacaaacaggagctcgtatgcggagcagttattagctgtaagaacggcagcgtacgcatacgctatgcagaccactattggtacgagggtgaagcagtagtcatccgtactcgatccaatagtggtacggagtgcaaacgaatagttgatcggggtgcataccagtagtggtctgagcacgaaccactattggtacgtagcacccgcctctacggaagtgaaaaacaccccccttcgggagcggcgtgcagacgaaatttggcggggagaataaaccttcgggagggacgggactctatatatgcgaagcaaagctcctatatagataggtacgcgcgagggacgcaggccaatgccccgcccccatccgaagcgaggctcatagcccagggaaaagccagacggctgacgctgcgagctgagatttggagtatctttgtgcggaattctacccgccccacttgcctccgcccttctggcggtgacgaagaggcgggaagtccctttctacagccccatctgcggggcactcttcatcaaaagacaaaccaacaatacaaccccacaagaatcatgacgcatcgacgccttaccgtctcgtgccttagcctcctgctcctcaccgcagggatcacgctcctgcccgcctgctccagccagtcgacccagcagggacaagcccaaggcccccaggaactccccgtacgcaccctctccgctagcgacttctccgccaacaacagttaccccgccgtcatccgaggcgaggacgatgccgagattcgccccaaggtatcgggcttcatcaccaaggtctacgtcaccgaaggtcagagcgtgaaggcgggtcagcccctcttccacctcgatgacgtcacctatcgcgccgccgtctcgcaggctaccgccagcctctccgcagcgcaggcttcactcgccacggcacagctgaaccagcgcaatagccaggacctcttagccaagaacatcatcagccagagcaactacgaagaggtctccaacgccctgaagagcgctgaggccaatgtcgccgtcgccaaggccgccctcgtctcggcacgcgagaacctctcctactgcaccgtcaccagccccgtctcgggcgtcgtcggctccatcaactaccgcgtggggaatctcgtcagccctcagagtgcttcgcccctgacgcaggtatcgaatacgcgcaaggcctacgtctacttctccgtctccgagcgtgagatgcagaccctcgcaggggatggcacgacagccaagagccttcccaaggtgcgcctgcgcctctccgacggcagcgaataccccgaagaggggacgatccagggtgtcagcggcgtcgtcgacaagaccacgggcgctatcacgctgcgtgtcgacttccccaacgctgagggcaagctccgtagcggctcggtaggtacggtcctcgtccccacccagacggcaggggctatcctcgtaccccagagcgcgacggtcgagctgctccacaagaagttcgtctacaccgtcgacaaggacggcaagctgaccttcaccgagatcaccgtcagccccgtcgatgatgggcagagctacaccgtcaccagcggcctcaaggctggcgaccgcatcctcgtcgccggcaccacgggcgtcaaggagggcgaggtcatcaagcccctcaccgaagaagcctatgccaagcagcaggaggctatacgccagcagatgatgggcaagggcggtgctgctgagaagcactaagcccccaccgccttaaccggaagcatatagagcaatgaatttcgatagatttattacccgccccgtgctctcgacggtgatctccatcatcatcgtcatcctcggggtcatcgggctcatacagctgcctatcgagcagtaccccaacctcgcaccgcccaccgtacaggtctccacagcctacgcaggtgcggacgcccagacggtgctcaactccgtcatcatccccctcgaagagcagatcaacggggtcgaaggcatgacctacatgacctctaccgccacgaactcgggcggcgcctccatcaccgtctacttcaaggaaggtaccgaccccgacatggcagcggtgaacgtgcagaaccgcgtacagcaggctcaggccctcctccccgctgacgtcgtgcgcgtcggggtgacgacgcagaagcgccagtcaagcatgctcctcgtctactcgctgacgagcgaagacgggcgctacgatgcgcagttcctcgcgaactacgccgacatcaacatcctgcccgcgctgaagcgtgtgcctggtgtcggctcggcaaataccttcagccaaggcacctacgccatgcgcctctggctcgaccccgacaagatgcgcgcctattccctcgtccccagcgacgtctcaggcgtcctctcggcacagaacttcgaggctgccccagggagcctcggcgaatcaggtgaccgcacctatgagtattcgctccgctacaagggccgtctgaagagcatccccgagtacgagaacatcatcatcaagtccgacgacgcgggcaacatcatccgcctcaaggatgtggcgaaaatcgagctgggctccctcagctacagcatcaactccctctccgatggcaaccccgctgtcacggggatggtctcgcagatcgcaggctccaacgctaacgacatcgtcaccgccatcaaggccgagatccaggagctggagaaggacttccctcccggcatgaagatgacctacgtcctcgacgtcacggacttcctctacgcctccatctggcatgtcatccagacgctcctcgaggccttcctactcgtcttcatcgtcgtatatatcttcctgcaggacttccgaagcacgctcatccccgccatcgcggtacccgtgtcgctcgtcggtacgttcttcttcctgcagatcttcggcttctcgctgaacctcctcacgctctcggcactggtgctcgccatcgctatcgtcgtggatgacgccatcgtcgtcgtcgaggccgtacacgccaagctggacgagggctacgactccgcccgcacagccagcatggacgccatgcatgagatctcgggcgctatcatctccatcacgctcgtcatggctgcggtcttcgtgcccgtgtcgttcatctcggggatcagcggtacgttctaccgtgagttcggggtcacgatggccgtctctatcgtcatctctgccgtcaacgctctgacgcttagccccacgctctgcgcccttctgctcaagccccacaagggtcacgaggggaagaagctcagcttcatcgaccgcttccatctggccttcaacgctgtgtatgagaatcgcgtcctgcgcccctaccgcaagggggtcgagttcttcgtgcgccatcgcgtcacctcgggcatcatcgtgctggtaagtatcgtcatcatggtcgtcctgatgaagttcaccagtagcgagctcgtgccccaggaagatacgggtacggtgatggtcaccgtcgccacacctccaggtaccagccgcgagaagacggagaaggtgctcaaggacgtcgccgacgtcgcgaaggcacaggacggcgtggagcaggtcatgagcatctcgggcttcagcctcataggtggctcgggctcgaactatgcctcgatgttcgtccgcatgaagcccttcggtgagcgtaagacgacgacgagtgagatcgcaggcaagctcttcgcctatggcgctaccatcaaggatgcctccgtgctggcgatgaccccaccgatggtcccgggctatggtatggcctcgggcgtgtcgctgacgatgctcgacaagacgggtggcgagctggataagttcttcgccgagacgcagaagttcctcgccgcactcaatgcacgccccgaggtagcctatgcgatgacgcagtacaaccccagcttcccccagtacgtcatcgacgtcgacgtagccgccacgatgcgtgccggcacgacaccgcagaccgtcctctccaccctacagggttacttcggggggatgtacgtggcgaacttcaatagctacggtaagctctaccgcgtactcctgcagtccgcccccgagcagcgcctcgacatcaacgccctgagcaatatctatgtgcgtaccggcacgggtgagatggcgcctatcacctccttcatcaccacggagaaggtctacggccctgcgagcgtgaaccgcttcaacctctacacctctatcgacgtgatggcctcccccgccccaggctatgccacaggggacgtgctgaaggccgtctccgaggtcgccagctcgacgctctcggcaggctacggctacgactactcgggtctgacgcgtgaggagcagggctcgtcggatacgacagcgctcatcttcggcctctgtctgctcttcgtctatctcatcctgagtgcgcagtacgagagctacctcctgcccttctcggtcatcctctccatccccttcgggctggcgggtgccttcatcttctcgaatgtcttcgggcatacgaacaatatctatatgcagatcgctctgatcatgctcatcggtctcttggcgaagaacgccatcctcatcgtcgaattcgctctggaccgccgccgcacaggtatgtcggtcacgtggagtgcgatcctcggggcggtggctcgtctgcgccccatcttgatgacctcgctcgcgatgatcgtgggactcctgccgctgatgttcgccagtggtgtcggggctaacgggaactccacgctcggtgccagcaccgtcggcgggatgctcatcgggatgatcctgcagatcttcatcgtccccgccctcttcgtcgtcttccagagcctgcaggagcgcttcaagcccctacgcttcgacgacatcatcacctcgaagccctcgggtgagatccttcagttctccaacacctccaagaccgactcacaagatgacgctcaagcatagccttcccctcctcgccctcagcctcacactcacaggctgtggcgtctacaagaagtatcagcgtcccacggtagatacctccatctaccgtggcgacaagatcgacacgctgagccaagacaccacgtccttcgggcagacgccctggcgtgcgctcttcaccgatgcgcccctgcaggcactcatcgagaaggccctccagcagaatgtcgacctgctctcggcgaacctctccacccagcaggctgaggcccagctcaaggccgcccgcctctccttcttcccctcgctgacgctcgctccctcgatctcagcaggtaagaccgagggcgtacccgccagttacagctacacgctgcccgtgcaagccagctggcaggtggatctcttcggctcgctactgaatgcctcccgctcgacgcaggcccagctcctccgcgctcaggcctaccagcagctcgtccgtagccgtgtcatcgcgagcgtggcgaatagctactacacgctgctgatgcttgaccgccagctccagctcacccgctcggctgccgagctcgccgcccacaccctcgaggtgatgcaggcgcagaaggacttcggccgtgctatggagtcctccgtgcagtccgcccgtgccaacctccatcaggtagaggcctccatccccgagatcgagcgccagatcaccacgacggagaatgcgctggccctcctcctcggtgagtcgccccgtgcctatagccgctccacgctcgaggcacagcagctccccagcaccttcgccgtcggcgtacccgctcagctactctcggcacgccccgatgtgcgcgtagcggagatggcactggccagctgctactatcagacgaatggcgcacgtgccgccttctacccctcgctcaccatcacggggagcgcaggctggacgggcgctcttgggcaggccgtatcgaacccgatgaagttcatcgcctcggctcttggctcgctggcacagcctatcttcgcccgtggcaagctcgtcgcaggccttcgtgtcgctgaggctgaggaagagaaggcacgcctggcgttccagcaaagcctctacaatgccggtgctgaggtaagcaatgccctcgccctctatgaggcctccgaggcgaagatcaaggccgagaccctacagatcgagagcctcgagaagaatgtcgagatcgtcgagaccctcttcaagacggggaagacctcctcttatctcgaggtcatcaccgcccagcaggcactcctgcaggctcagctctcccagatacgcgaccgcttcagcaagatgcaggccgtcgtgaacctctataatgccctcggcggaggtgcccagtaatcccctatcgctatgatcagtccacaagccttcatcgcacctggcgcccagatcggcgcccgtgtgacgatctatcccttcgcctacatcgaggacgacgtcgtcatcggtgacgactgcaccatctacccgcacgtcagcctgatgaatggcacgcacatcggtagtggcaacaccatctatcagaatgccgtgctcggtgcctcgccccaggacttctcctacaagggcgagaagtccacactcatcatcggcgacaacaacgtgatccgtgagaacgtggtcatcagccgcgcctcccgcagcgacgtctccaccgtcatcggcagtgggaacatccttatggagggtacccacatctcgcacaactgtcaggtgggtgatcagaatgtcttcggctacgcggtcaagatcgcctgcgactgcaccatcggcagccgctcgatcttcagcagcggcgtcacggccaagccccgctgtcgcatcggcgatctggcgttcatcctcacaggctgccgcttcggcgaggacgtaccgcccttcatcaccgtcaaggacaaccctgccgtctacgctgggatccatgcgggtatgctctccaaggcgggtatcgacgagcgcacacagcgccatctcgcgatggcttaccgcctggtcttcaatggtaagatcagcctctacgacgccatcctgcagatcgaagagcaggtacctgacggccccgaagtccagcaggtcatcgccttcctccgctcttccgagagcctcatcatgaagtaaggcccccacgactccctacccgcgggttaggctgagatatgccctaccccatacagtccgaggccctgccgtgcgatgcacggcagggcctcggactatctatacgcagccgtgtacaggggcggaggtcggatgaacctatattggtcagcgggctgagctatatgggtccacgcagcagcaagctatattggtcgatgaagcgacctatataggtcagcccgctgaccaatatagcttcgcaccaccctcccctataggtacggtcaacaccttttggggaaacaaagaagcctccccgcaggagaagcgcagggaggctctaatgcgatcgcccgtcctcgggagccgtgggctcaggagggcgggcgatactacaccaatctaacctattcaatccaggaggtgaatcctgaagagagcgatggcagtcggctctgtatgacttctctcgcgaagggggagaagccgccacaggaggccgaagagagggattcgtctcggagcttagtccttgaacttagcagcgaggaactcgcggttcagacgagcgatattggagatcgagatgttcttggggcattcgacttcgcaagcacgagtgttcgtacagttaccgaagcccaactcatccatcttagcgaccatagccttagcacggcgggcagcttcgacacgaccctgtgggaggagagccagctggctgaccttagcagagacgaagagcatagccgagccgttcttacaagctgcagcgcaggcaccgcaaccgatacaagcagcagcgtccatagccatgtcggcattagccttaggaatggggatagcgttagcatcgggtacaccaccggtattgaccgacacgaagccaccagcctggatgatcttatcgtaagccgagcggtctaccatgaggtcacggatgatggggaagccagccgagcgccaaggctcgatggtgatcgtgtcgccatcgttgaagcgacgcatgtgcagctgacaggtcgtgatgctatcatcgggcccgtgggggtgcccattgatgtagagcgagcacataccgcagataccttcgcggcagtcgtggtcgaagacaacgggctccttgccttcgcgtacgagctgctcgttgaggatatcgagcatctccaggaaggagctaccctgagagatattctgcaggtcgtaggtttcgaacgcaccctttacctcggggccacgctgacgccagaccttaaccttgatatttatattcttgtccattgtggatgttggcttggggttagttcttatagttacgctgctgacgtacgacgaactcgtagtccagaggttccttcagaaggacgggatcctgatcttcgccctggtactcccagcaggagacgtaagcgaactgatcatcgtgacgcagggcttcaccttcgggcgtctggtgctcgaggcggaagtgaccaccgcagctctcttcacggtcgtgagcgtcacgagccatgagttcgccgatctcgatgaagtcagccagacgaagagccttctcgagctccacgttgaggtcgtcagccttaccagggatacggacgtcgctccagaactccttcttcagagccttgagctcgacgatagccttctcgaggccttcgcgctcgcgacccatacctacgaagtcccacatgatgtgaccgagcttcttgtggaggctgtcgacggactgcttacccttgatgctcatcaggcgagcgatacgatcctggatacccttttctgcttcgtcgaactcaggaaggtccgtgctgaagcgggggacctgaatctggtcagccagatagttctggatcgtgtagggcagtacgaagtagccgtcagcgagcccctgcatcagagccgaagcaccgaggcggttagcaccgtggtcggagaagttagcttcaccgatggcgaagaggccagggacagaggtcataagctcgtagtccacccagataccacccatcgtgtagtggatagcgggatagatcatcatcggcgtctcgtagggattgtcgttggtgatcttttcgtacatctggaagaggttgccatagcgagcttctacgacatccttaccaagacgcttgatagcgctggagaagtcgaggaagacagccagccccgtgttgttgacaccgtagccagcgtcgcagcgttccttagcagcacggctggcgacgtcacgaggcacgaggttaccgaaggcgggatagcggcgctcgaggtagtagtcacgatcctcctccttgatatcggtaggacgaagcgtaccagcctggagcttcttagcgtcttcgatattcttgggcacccagatacgaccgtcattacggagcgactcagacatcagcgtgagcttagactggaattcgccgtggacggggatacacgtggggtggatctgtgccatacaggggttagcgaagtaagcacccttcttgtagcactgccaagcagctgagccgttagaggccatagcgttcgtggagaggaagaaggcgttaccatagccaccggtaccgatgacgacagcgtgagcagcgaagcgctcgatcttacccgtgacgaggttacgggcgatgataccacgagcacggccgtcgatgatgacgacgtcgagcatctcgtggcgggtgtacatcttcaccgtgcccttaccgacctggcggctcagtgcagagtaagcaccgaggaggagctgctgccccgtctgaccacgagcgtagaatgtacgagagacctgtgcacccccgaaggagcggttgtcgagaaggccaccgtattcgcgagcgaaaggcacaccctgagcgacgcactggtcgatgatgctattagccacttcggccagacgatagacgtttgcttcgcgagcacggtagtcaccacccttgatcgtatcgtagaagaggcggtagacggagtcaccatcgttctggtagttcttagcggcattgatacccccctgagcagcgatcgagtgcgcacgacggggagagtcctggatacagaagttcaagacgttgaagcccatctcagcgagcgaggcggcagcggaggcaccagccaagcccgtaccgacgacgatgatgtcgaggcggcgcttgtttgcagggttgacgagcttctgatggtccttataggaggtccacttctcggccaatgggccggcggggatcttcgaatctatcttagacataatcttagaggtatggatagcttacttgtgggatgaactgtggttagcaataccacaaggagcccccgcagagggcttggatgaaataatagatcacgacgacagcgaagccgaggacgatgatcgtcgtatagatgttggagatgcaacgcagacgctcaaaccagacgcggttgttgaagccgatggtgtgcagtgagctccagaagccgtgagacaggtggaaccacagtgaacccagccagatgaggtagaggactacgaagatgggattagagaaggtgtagcggatcaggccagcgccgtccgtaggaccagtgacgccatcgataccgaggtcatgctgaccgatgatctctgcgagctgcatcttagcccagaaattgaagaggtgcaggaagatcccgaggacgatgatgacaccgagagccatcatgttctgcgacgcccactcgacacccttaggcttgtcgacgacatcatagcggtcgttaccgcgagccttgcgattctgaagcgtcaggatgaaggcatagacgatgtggacgatgaagaggactgccagccccatcgaagcgaccagggcataccagttagctccgaggaactcacacacggcgttgtaggcttcttcagagaagagcgccacaaggttcatcgacatgtggaaggtcaggaacaggataagcgcgaggcctgagatgctcatgaccagcttacgcccgatcgaagatttaattaaccacgacataaagttgctatttaattgattctatgttattgtcttcttgtggagatatattgctatcgtgcaagacattagggcgccccatagctgtgtcgggacgcacctccttatgcaatgcacgctacaaagatagcttaattaggtatatgccgtactaacattagcgaaaaaaaggcataatcctaccactgcatatacctcatagtaggtacatacaccacaaaactgacgcaccacagcgcggctacctacctatatatagctaaccatatcgctgtatcagcgagaagagaagagggggagaaagcaaaaacgagaatacctcaagcacgcaccaagacacggagatagcgagctataagataggcgccgaatatagtggcggtataaaccacgacaaggtaaagtagtggcgactgaatatagacgactggactcctaaagaagttcacgaaggacatgtgcagaaggtaggtctcaagcgatataccaccgagccacatcagagcactcccaatggggccgtgcgcacgtcgcataaataaatctgtcgccccccaagctttgctaagagccgtgagcatcacaggcagggcgaagtaagcaagatggctgatgaagatcagcactatagactgattcgggaaggtcagcacactccatatatatacccccatcaaaagtagtactgcaggaaggcagaggatgcgatacgactttatctgcttatatatactccgctcatagatagcataggccacgcccacagagaagctgaggggatagcgaagccagtagtatccgaagctggcctgccatgcggctaacataaggaggagcgtaagcaagatgagcacgagtacagccctaccccaacgtcggacatatcggaaggagaagtagaagaacacatagagcagtatcaattccaagagataccacgcagccgtctcagggccaggaatgccaaacttccaaatcaagaggttaaacttaagtcgctccagcgcttgaggaatatgattaaatccctctccggcaaagaggaagaagagtgccacagcatagaagaagaggaacggcttcaggagcccccagagtcttcgggggagccagcccgcccatagggtcgctggagacgtagtaggtgtacgaagggtacgcagacgcagctgggtcatcagcccatagcccgagaggaagaagaagaagaccagggcaagcggtgtgaggagattacacacacgtagccacaggagcgcctcatcaggctggcacagcgagctgatatgcgtccctacgataaacaaggagagcgccccctttagggctaccgaaaattccttgggcaaagtcgaatctaccacgtcgatgattacttattagacatctgctatagtacaaagatatagcatcttgcggcatcacaacgaataagcctcaggcaggagtcctgacccgcgagtttccccaccgtcctggacgccacctgaggcatatccactaaatcattacggcaaaagtaccactgcccactttattcaaaagagcggacatcctctttggggaataaattccaagcatagagacccatacttgtagctttcctcgaagcattttgaatgagcgttgcaggtcttctgactcgtgcaccttgtctcccagccacccttcccagagacacagaacctccagtggtcagggcttcgacatagccctcggcagggagcagtatgatgcacatacagcagcgggactgttcgagattctcactcgattcccttttaagcccgacacacagcacacagatcttcgcgtgtcaggcacaacgcctttacaaagatacgatattatctctgatcaccatccacctgcgcactcagattgcgctgtggctgtttgtcactggtcagcagctcacgcttgccctctggacggtagtagcgggtgagcaacgtgaagcgatcgggtatatacaccgtgaccgcttcgccagcattacgcaggaccacgaggcccatatgccggatgagcttttcttccatacgagcatcagggcagcccatacgtgtggacatggtcttgccatcactcttgaagatgtagggaaggttcagcccttcggcttccatatcgagctcgaattttccgctcagtacatggatattgcagtcgaccttcttccgtatgcacgggatcagctcgatatagtagtccgggctattgcccttatgacgctcgggagcagtgatgacgtaggccgtatagcctcgcttacggggaagcttactggcagcggagtctggactgaccttcgtcgccttgcccatagcgcgccagatacggtagacgacgcgcacactatcattggtcgtgatggccagctccttattgcctcggaagggaagaaggaggggctcaccatagaggaagggcttaggatccagaccctcgataggcttgtcgaaggccgagataatcccctcgccatgctgatagcggtaggaggagaagacatctacctgggtactgggtacgaagcgcccatcgatgctggtgtgcgtcgggtccgtattcggcagagcaggcagcagctccacgcggtagtcctcgagggggctggcgtgcgggagcgtcaggcggtaagtatgtggggggagcgggaccttagagtagtcttcggtatagctgacgactccctcgcgagcctgatcaccttcctcaccattctgcccatcgtgggcagctcggcagctggggctaagcaggacaagtgcaataaaagctaagagggaagttaggtgggcgcttgaagtagtcatacatcgtcgatagatgagctatctactaagattaacgggtatccccccgaatttattattcgataggatacccgtaataatcttttcttggtccgtgtggcgctgtctctaagcctgaggatggagcggaatgtccagggccttgaagaccttgacgagcgcttcgatagcgcggtcaagctgctcataggtatgggtagccatgagcgagaagcggatcagcgtatcgccaggagcgacagcaggagccacgacgggattgacgaagacaccttcctcgaagagcatagccgtcacgcggaaggtcttctcattatcacggataaagagtgggatgataggcgtcgaggtattaccgatctcgaagcccagcttacggaagcgatccaggcagtaagccgtcttctcacgaagcgactccacacgctcaggctcacgaagcatgatctccagagccttagaggcagcagccgtcgaggctggcgtacagctggcgctgaagatataggagcgagcgtggtggcggagatagttgatgagcaccttgctaccagcgatgaagccaccgagagaggcgaagctcttactgaaggtacccataaggaggtcgacctgatcggtcagaccgaagtggttacacgtaccgcgaccgtggtcaccgagtacgccgaagccgtgagcttcgtcgaccatcaccgaggcgttgtacttcttcgccagacgcacgatctcggggaggttgcacaggtcaccctccatgctgaagacaccgtcgacgacgacgagcttgatgcgatcggggtcacactgcttgaggcgacgctcgagagcttccatatcattgtgcttgtagcggaggctcttagcgggagagaggcggataccctcgatgatcgaagcgtgatcgagtgcatcccagatgatatagtcttcacggccaaggaggcaggagatgaccccgaggttgacctggaagcccgtggagaagatgatggcatcttccttgccgacgaaggcagccagctgcttttccagctcaaggtgcgtatcgagggtaccgttgaggaagcggctccctgcacatcccgtaccatacttctccgtagcggcgatagcagcagccttgatctcggggtggttcgtcagtccgaggtacgagttcgacccgaacatgaggaccttacggccatcgatgacgacctcggtatcctggtcgctttctatctttcggaagtagggataaatccctgcagcctgagccttctggggctcggtaaaggatgctaatttctgctcaagtaagttcatcttatatctgtcaagcatccgcccatagtgctaaacgggcacctcacgggcgctctcatcgtggagcgcgcgatgggcggactgggtcggggagctgcgatcgcaaggagcgccacagcccggacacctatagtaatagagctcttattagaggtggaggaaaggcccccacacgagcgttataaatacgggcaaaagtacacattttcccctaattcgtgcaacgcacattcacctaagccgcttttccagtgcaaatgcgggacaaacagcgccctccaaacggtatgaaaagccataacctctcccctacttccgtagccgaaatcacgatgccttggcagcactgcttaggacactatcacacaagccaatcgccacgctcgctgcccgctgctcaccgaggagggaaaatgaagtagtactggtcgctgcatcgaccagtactggtagacattagtgaccagtactgatccgcggtgtgaccagtactggtccgatcgctgaccagtactggttactttcacccccttcacgagcccactctacacgcgcttcagcagggtgctctttgctcatcacttgggatgtgcgtcctggacacattcgcttcctttacgccttccctctatttatcgtatctttgagcatatacatggtctcgaaccacatacacaatcatcactataagcaatggatataaagaaaccccttctctgtgggcttctcctcggtgcggcggcactctccgcctctgcacaggaacgcccactctggctgcgctatccagctatctcccctgatggcaagacgatcgccttcgcgtaccaaggcgatatctacaccgtacccaccgtgggtggtgaagcccgtcgcctgacctcgaccgaagcctatgagtgctatcccgtctggtcacccgatggcaagcagatcgcctacacctccgaccgcaactcctctggcatcaacatctacatcatgccagcgggtggcggtaaggctcgtcagctgacgacccactcggggcgtgagatcccccaggccttcactcccgatggccgctacctgatcttcaaggcacacatccaagatcctgtcagctccgccctcttccccaactccctgctcactgagctctaccgcgtgcccgtcaccggtggtcgccccgagcagatcctcgctactcccgccgaagctgtgaatgtcagccgtgatggccgacgcatcctctatcaggagatcaagagcttcgagaacgagtggcgtaagcaccacacctcctctgcctcacgcgacctcctcgagtacgacttcgacaagaagacctaccgcttcgttgcccgtcacgatggcgaagaccgcgatcccgtctactcccccacaggtaagtccttctacttcctcagcgagcgcaatggtggctcgatgaatgtctacgaaggcaacctcgccggccccgctaccgaagccaaggcactcacccagctcaagggtgaccccgtgcgcttcctctccagctcagccgacggcctgctctgcttcggctatgccggtgagatctacacccttgtccctggtcgcagcgagcagcgtgtacccatccgcatctccaaggaccaggctcccgacgaagagctacacctcgcgatgagccgtagcctcggctctgccgcggtctctcccgacggcaagcagatcgccttcctctcgcgtggcgatgtcttcgtcacggctaccgactacaccacgacccgtcagatcacgaagggttcacaggccgagcgcggtgtcagcttcggcgcggacaacaagtccatcgtctacgccagcaccaaggacggctcatgggatctctacatcgctaaggtcgagcgtggcgaagatcagaacttccccaacgctatggcgatcagcgacgagaagctcatcccctcgctcaagggcgagaagatgtacccctccttctcccccgatggcaatgaggtagccttcctctaccagcgtgagaagctcatggtctacaacctcaagacacgtcagactcgtcagatcaccgacggcaagcagacgcttgaccccgacttcgtatggtcacccaacgggaagtggatcgccttctcctacgtctcccgtggccgtgggccctacaccgacgtaggtatcgtcagcgctcagggtgaccagcccatccagaacctcacgaacagcggttacttcagtagcaaccctcgctggtctaccgatgggaacatcctcctctacgctaccgataagtatggtatgcgcaaccacgcttcgtggggctctatgaacgatatcatggcggtcttcctcaatcgtgcggcttacgagaagttccgcatgaacgacgaagacctcgccctcctcgaggaagccgagaagcaagccaaggccgacaccacgaagacgaagaaggctcagcccgctaagagcaccaacggcgtcatcgaatgggacaacctcgacctgcgcaccgtacgtatcacccccgcctcttcgcgcctcggtgactacatcctctcgcctgacaacaagaagctcttctacttctccgctaccgaagctgggcaagacctctgggtctacgatatgcgcaagcacacgacgcagctgcagaagaagatggacctctcctctcccttcttcgcttcggacaagaagggcacgaagctcttcatcctcggcgcttcacccatgacgctcgatcccaagacggatgccacgaagcccatcacgatggctggccaccgccgcatcgaccgcatccgcgagcgtgaggtcatgtacgaagaagtcgtccgcgaagaagaagcacgcttctaccgcaaggatatgcacggcgtgaactggaagaagctcaccgaccactaccgcaccttcctcccctacatcgacaacaatcaggacttcgccgagatgctgagcgagctcctcggcgagctgaacgtatcccacacgggctccggtgctcgcagctcatcgtcggccttccccacggctgagctcggcgtcttcgtctcgcctgtagcaggctctggtgccctgcacgtcgacgaagtcgtggcaggtggtcccttcgacaactcccacacgaagctgcagaagggtagcctcatcaccgctatcgacggcgagaagctcgaggcaggcaaggactacttccccctgctgaacgataaggtaggcaagcgcctcctcgtctccttccgcaccgcctcaggcgagcaggtcgacgaagtcatccgccccatctcctcctctgccctcaatgacctcctctacaagcgctgggtcaagcagcgtgccgaagaggtagagcgcgtatcgaagggcacactcggctacgtccacatcccctcgatgggtgaccccagcttccgcacggtctactccgatgtcatgggcaagtactaccagaagaagggtatcgtcatcgacatccgctacaacggcggtggtcgtctccatgaggatatcgaagccttcttcacgggtaagcactacgccgaccaggtcgtccgtgaccgccagtactcggagatgtcctcccgccgctggaatcgcccctctgtcctcgtcacttgcgaagctgactacagcaatgcccacggtacgccttgggtctatcagcacctcaaggtcggtaaggtcgtcggtatgcccgtagctggtacgatgaccagcgtgaactgggtgacgctcctcgaccccagcgtttacttcggtatccctgccgtaggcttccgtctcttcgatggtcgctatctggagaacacccagatggagcccgacgtcgtcgtacctcttgatcccacgaaggtcctgcagggcgtcgacacgcagatcgagaaggccgtcgaggtcctccgcgctgagacgaagtaatcccccgcacttcactaatcgtatttatataagcgtagcccctgcatcccgagtgatgcaggggctacgtgcgtaatggcgtatctttgcgcccgatgaagaagacccatcccaccccatccaccgaaggcatcgaccttcgtgatgtgcagcgccgcctcggtagctggtacgacgagcatgcccgtgccctcccctggcgcgaagatgtatcggcctaccacgtcatgctctccgagatcatcctccagcagacgcgcgtggaccaagggatggcttattatcatcgcttcaccgagcgcttccccaccgtacaggacttagccgccgcgagcgaagacgaggtactcctcctctggcagggcctcggctactactcccgtgggcgcaatctcctgcgtgccgcacagatcatcgtctcggacttcggcggagagatcccccacacccccgaggggctgagccgcttgccaggcgtcgggccttatacgcgcggtgcgatcctctccttcgcctacaacctcccttaccccaccgtggacggtaatgtctaccgcgtgctgagtcgcctcttcggctctaccgagcccatcgacacgacacgtggctcacgctcctactgggagctggcggaggccctcctcgacaaggcgcatcccagccgccacaaccaagccgtcatcgagctgggtgccctctgctgtacgccccgtcgtccgcactgcgatgcgtgccccatcgctatgcactgcctcgcccatcgcgccagcatcgaggagcagctccccatcaagcagggcaagacgaaggtcctcccccgccatatggactacttcctcatccgcctcccccacacatcggggggcgaaggcctactcattcgccgtcgtggtgctggcgatatctggcaggggctgtatgaattccctcttatcgagacgggagagacgggtgtcaccgtcgaagagctgacgaagctccccgccttcggtgacctcatcgcagcactcgagcgcccgaccttccactccacccccatcgcacagtgctctcacaagctctcccaccgtgctatctatgctcgcctcttcctcatcgaagctgagggcctcagtacggagcttccctaccagcatataccgagcacggagcgcagtagctacgccttccccgtactcatcgagcgcctcttagagcaagtgccatagcggagggagtacgacgtacccatagtcctacctaagtcaacctatattggtcggcgggcgaagctatattggtccgcgccgtgacctatattggtcgcagcgacgacctatatagctttttgaagtgacctctattaggttgttgctccgcgtagggataaaagttgcggacgagtggtagaaaagttaggactacgtacgtggtcctaatatctacgtacgtggatatttggattgacctgcctggtctttaagactacgtacgtagatagaagaaaaccactacgtgaaggcgctttttccttcgcgagaaggatacttttcccttcgctgaataagaggaatactcacgataaggcgaagggcgtgcttgctcacttcggagaggcgtatcggggagctgggcgtgcgatgccttagcaggacaaatagagaacaggactctcggcaacagtccccgatataggttgactcgatgaccaatataggtcactaccaccccctgatattgtgggtcagacgccccccgcgaattatggttggataaaattccctatctttgtggctcaaattgcagaacatagcaaagtataagcaactaatatattagacaaacgagatgaaaagaacgttccaaccatcgaaccgcaagagaaagaacaagcacggtttccgtgcacgtatggctacggctaacggtcgtcgcgtactggctgctcgccgtgccaagggccgtgctaagctgagtgtctctgacgagtactaagccaagcctcttgcatttaggtcactgacctaccccttagagggctcccgtagtgcgcactacgggagccttttttctttgccttgctactatgaatacacggagggacacgcacacatctgagcgaagtgtgcatatttctctatctttgtcctgcctcccataaggcaagcgccccactacggggcgacaaatcatcctatatagcaatgaagaaaacgctactcctgggcctcatcgccctcaccgccgcccccgcagcacacgctgggggtctgctgaacaataccagcctccacgccctctacctgcgtagcctcgcacgtaatgcctcactcgctatcgacgcgacctactacaatcccgcaggtcttgtcttcacacccgacggctggcgcttctcggtcaacagccagaccgtactccagagccgtgacatcgacgctaccttcgccccattcgcttactctacggcaggcactactactaagcgctttgaggggaaggccactgcgcccatcgtccccacgctcatggcttcgtataagaagggtgactgggcattctcagctgtcgtaggcgtcttcggcggtggtggtaaggccagcttcacaagcggtctccctcagttcgaggcgaacgtagcactcgtccccacgatcacgcaggccatcgctcagaaggctaccgccatgatcgctaccctccccgcaggggcactccccccagcagctcaagctggcttcgctaagctcatcgacccgatcaaggcggctaacaagtactccgtagacagcaagctcgagggactccagtacgtcttcggcctgcaggctggtgcaagctacaagatcaaccagcacctgagtgcctacctcggtgcgcgtctgagctatgcctacaacacctacacgggctacatccgcaatatccaggtcagcggtgctgatggcgccatgcaccacgcccccacctacttcggtgtgatcgctgcgggagctaaggcagctgagcctatcgtcaacaacctgcccgacgctctcaagcaacaggtacagcctgtcctcgccgtccctggccttctagcaaagaacaccctcgacaagcgcatcgaggtcaagcagacgggtatcggtctggcgcctatcgtcgggctgaacttcaactacgaagggctgaacgtaggggcacgctatgagttccgcaccgctatccgcgtgaagaacacgactgaggccaatgattccggcatggagcagttcgccgatggtgctaaggtcgccaacgatctacccgctgtactcggtgtcggtgcttcgtaccgcatcctccccacgctgacggctgcagtcagctacaatcacttcttcgagaagtctgcgaacatggctggcgacaagcagaagaccctcaagggcaacacaaacgaatatctcttcggcctcgagtggaacgccctcgactggctcgacgtcagcggcggtgtgcagatcacgcgcaaaggggtgagcgatgcttatcagagcaacatccacttcgacatgagctccacgtcctacggcctcggcgtcggcctgcacctcacgaaggaagcccagctgaacctcgcctatatgatctccagctacggcgatcacaagaaggccatcagcacctacgctgctcagcctgcccttggcatcgcactccctggtagtgaggtctacacccgcaagaatcagatcttctccatcggcctcgactacacgctctaaggccgagcaagtcccgctaaacgaccgagccccgacctcccacataggagatcggggctcgatcatttggtagctaccgtagcctaacggctgtgctcacagcaccaatcgtaggcattgcggaaggccttcatccatggagtcacctcgtgctcacggcggtcaacctcggggtagtaagcgcactgccaggggaagatcgcacgctcggggtgaggcatgagagccagatgacggccatcagcactgcaaagccctgcgatagcgtcaggcgagccgttggggttcgcggggtacgcatcataggcgtagcgtgcgatgacgtggtagcggtcgctgtcgtaggggaggtcgaacttcccttcgccgtgagctacccacacaccgagtgacgcaccagccagatcacggagcatcaccgagtggttctcggggatcgtgaggctgacgaacgagctctcgaacttgtgcgagtcgttgtgcgccatcttatgcttcagctcgtgctcaggatagaggagctccagctcggccatcagctgacagccattacagataccgaggctcagcgtgtcggggcgagcgtagaagcggtcgagcgtagccttcgcctgctcgttgaagaggatacctgctgcccagcccttagccgagccgaggacgtcggagttcgagaagccaccgcagaagacgatgagctgtacatcatcgagcgtctcacgacccgagatgaggtcggtcagatgcacgtccttgacgtcaaagcctgcgagatagagggcataagccatctcacgctcaccattcgtccccttgtcacggaggatggcagcacggacaggcgccttcgctgtgcgatcgggatcgagaccgagatcagcgagcttacccgtgaagcccttaggagccgtgaggcggaggggctgattcttatagccttcgtagcgagccttagccagctcttcgccgctctgatacttgtccatcaggtaagaggagcggtaccagaggtcgcgcttggcatcgatgtcgagcgtgagcgtggacttcttgccgtagcttaccgagagcgtgcgcccgtcggccgtaggcgtagcgatgcgagcgaagccgatgctggcatcacgcagcacttcttcgaggacttcgggatgtgaggtctgcacgagcacaccggggttctcggcgaagaggagcttgacgatatcgtcctcggggaaggccgtgaggtcgaccgacagcccgcccttcgtagaggggaagcacatctccagcagcgccgtgatgaggccaccgcccgagatatcgtgaccagccgtcagcacaccgcgctggatgagctcctgcacagcagtgaaggcttcgcggaagtactcaggctcctcgatacggggcgtctcgtcaccgagctgaccgagggcctgcgcgaaggctgagccaccgagcgccagcggagagaagctgaagtcgatatgatagacagggtatgcgggattcgcgacgagtacaggtgagaggatcttcttcacgtcagagacctcaccgatagcgctgatgatgacggtgcctggactcaggaccttctcgccgttggggtacttctgcgtcatagagagcgagtctttacccgtggggatattgatgccgagtgagatcgcgaggtcagaagcagcctctaccgcgtcgtagagacgagcatcttcgccctcattgcggcagggccacatccagttggcactgagtgaaacaccctcgaggccataggtaaggggggcaaagacaatattcgtcagcgcctcagcgatggcaagctggctaccagctacggggtctaccagtgccgctacgggagcgtgaccgatagaggtagcgatacctgcacgaccgcggaagtcaactgccatagcaccgcagtcgctcaagggcagctggatctcaccctgacactgctggcgagctacacggcccgtgacggagcggtcaaccttgttcgtcagccagtccttacaagcgaccccctcctgctgcagcacctcatcgaggtagtgctcgactcgggcagcgtcatagctgagggcgggataagtcttgtcgatatgcttgtcgaccatgtaggtcttgggcgccgagccgaacatatccgacagcgccaggtcaatgggcttatcaccaccggcctcttcgaaggtcaggtgcatatcgtccgtggtgcgaccgacgacgtacatcggagcgcgctcacgctcggcgatacgggcgatgcgctctacggcgtcgcccttgaccagaaggcccatacgctcctggctctcgttgccgatgatttccttcgacgaaagggtctcatcaccgatggggaaggcgctgaggtcgaagtgtccacccgtcgtctcgacgagctcggagaggcaattcaggtgcccccctgccccgtggtcgtggatggagatgatgggattgtcttcactctccgagagcgtgcggatgacgttctcgacgcgcttctgcatctcggggttggagcgctgtacggcgttgagctcgatagcaccggcatactgccccgtgttcacagagctgacggcaccaccgcccataccgatgcggtagttgtcaccaccgagcaggacgacctcttcaccaggctcgggagtgcccttctgtgcatcgctgcggcgggcatagccgacaccaccagcgagcatgatgaccttgtcgaagccgtaggtaggttcgtcggccttaccttcgtgctcgaaggtcagcaccgagccacagatgagtggctgaccgaacttattcccgaagtcgctcgcaccattggatgccttcgtgaggatctgacggggcgtctggtagagccaagggcgggcagcgctgtactgctcccaagggcgatcggctgccgtgcggggatagctcgtcatatagacggccgtcccagccagaggcacgctggcacgaccaccagccatacggtcacggatctcaccaccggtaccggtagcagcgccgttgaagggctcgacggtcgtggggaagttgtgcgtctcagccttgaggctcagcacgctgtcaatggacttacggacgaagaagtcgggcttatcacccgtggcgggagcgaactgctcaaggtcgctggggccatcgatgaaggccacattgtccttataagccgagactaagtgattggggttagcggcgctcgtgtccttgatcatcgagaagaggctacgctcttcttcctccccgttgaggacgaaggtaccaccgaagatcttgtgacggcagtgctcgctattgacctgcgagaagccgaagagctcgctgtcggtgagcggacgcccgagacgctcgctgagcccctcgaggtaggagatctcctcatcgctgagagccagaccgtgggcgtcattgtaggcccgcacgtccgtgatatactcgataggcgctgccgtgatgtgcgtgtcgaagaccgtagcatcgatcccctcatagagggcctgcagcatggggtcgaaggatgcatcgggccccgagacctcgctgaactcctcgatacgcgtgaccgtggggatgttcatattgcgcacgatctccaccgcattggtgctccagggcgtgacgagctcgcggcgcgtcccgacgaagaagcccttgagggcgggggtatcaagcaaagtagccccaccaaagagccaggtgaggcgatcgagggcttcggcagccaagggcgccgtgctctccacgacataaagcacgggggagctgtgcttcctaaagagagtaatcattcggagactataaatattgtcgtaagagggatgtgatcctgaggagatcgaagcagaggggcggggcgctgaggcctcttccctatgagcaaagatacggaaaaaggcaaggcctcactgcccagagccaggggctctaagcggtgaggccttgtagtgtgtcggcgagcatagcttacgacggtgcggtaggctttagctcgggatgcggagggtacgccctgtggagagcttggcgcgggcggagatgccgttggtgcggcagagcttgcttaccgagacgccatactgagctgcgatagcgcggacggtctcgcccttcttgatgcggtgcgtcttgaactgctcttcgttcgactcgccactcttctttggcttggcagctgccttagctactgcgaaagagcggggcgtgcgataggcacccttgacgaaggcgaagacgtcatagcgtgggacacctgcctggaagtcgaagaggtccgatgggtcgatggggatacccataaagcgtgcttcgaagtggaggtggggcccagtagagcggcccgtgctaccgccgagaccgatggggtcaccagcgcggacgaccgtcccttcgcggacgatggagcggctcatatggccgtagaccgtctccagaccattggggtggcggatgacgacgtagttgccgtagcccccaccttcgtaggacttgatacgcaccttcccggagaaggctgcacgtaccgtgtccccgtggctcagcttgaggtccgtcccgtagtgcatacgcccgaagctatggcgatagccgtagttcgaggtgatttggcgggtggcgatgggcatcacgaactcctgcaggtcgatgtcttggcggtcggggatgttgaccgacatacctgcgaaggggtttacgtgacttccccaggactcttcgccgtagagctcggaggccggtgcctcgagatcttcgttttgcttcttagctttcagatcagcctcgcgacgctgcttctccttggagagacgattcttgatctcgagtcggtcggccaggagcaggtgttcaccagtggtgcttgcctgctgaccggctgtcgtgcgtgtctccttctttggtgtctgagccttccctgaggggggcgttgcagcccaggcagggagtgtcgtggcagccagacacagagatgcgcataacagtcgcattctttttcttgtcataccagcttttgatactacattaatgataatacctggcgggagcgcgcctcccgtcggtgtgcacggatgcaaagcatacactatgcgacaaatgcaaagataaccaaatagttacaaacgccaacactgcacaagcgcgcagtatatgtgcagtccccgacctactttctgcccttccgagcctcaggtgttgggtgcattcaccttaataacgtggggcttttactcaaggtatatccctcgtcactcgcatcacctccgacagctcacgggaccgctttgtgagggagtttgcggatttacttccccttacggtcggtctgctcgatggtctcgttgccctgtcgggtacggaagcgcttcccaaagctataggtcagccccagacgcacgccgctactatgattattcgtcacccagcgggtctgcgtgacatcacggaagaagtagcgggtatcggtacgcatcgtcccccagggattgaggagggagagtgtgagggagaggcggtcgtcgaggaagctcttattcacctcgaagtacacgtagggcaggtggtcacgctggtaggagaaggtcagctccctacccgaccactgcgcatagatggtgtacgtccagtctcggctcgtcgtgtagctgaggttgagcgtaccccgatagaagagcccactcccgccagcgctcagggcggtgaggcgatgctcgggtgctatctccttcgtgacatagccgagggccgtcccgaggttcagattcatcttatgcttgaagaaggagctattcacacccagtgagagggcgtaggcggtgcttcgccctacgttcgcccaagtctccagctgaggatcagcaagcgcatggatacgcccgatagcgtccagcgtccgagtgtaggtgaaggccgtcgagaggaaggtctgcttgacctgacgctggtagcggagtgcgagcgtatgggtgcgctcattggcgatgctcgcattcccctcggtgtattcggtatcggaggtatagtagcgtgtggggtctacgatctcccccgtggggcgagagacgctgaggtcatagctcagctcgacagcatcacgcgctccactataatagaggctggcatagggaaggacgtaccaagcgcggcgcgtcagtgtggaaaggcgctgctcatcgtactgcatatccagcaggaagtccccaccccactgctcgccccagctgacctcatcgcccagcttgagggcatggatcaggctcttatagcgctgggggctatagctcgagcgggtctcacggtgcgtcagggcgtagctggtattcagcttatgccgaaccgcacgcccctcgagcttcgtctgataggtcaggtcgcccgtgagactccgataggtattctccgccgcgtgcgtagcggtctggaggctcagctcttggcgatcccactcactcgccagatgcccacgcagacgaaggaagctctcgccccacttatagcggctcgccagatgcccctgcaagacctgcatatagcccgtctcatccagccgctgagagggaagggcatcttgggtggactcgctgaagccatcatgtccattgcgcgaatacatcgcgacgagcgtattatcccagtgcttgctggggaagaagtcaaagcgcagaagcgagcttgcctgcttggtcttagtcgtcgtctgatgatgccagccgtgtgccacccccgcactcttgcggtcaagctgtgaggagatctcctgccgactccatagcgccgaggggacgaaggtcagcacggtcgtcggggtctgtagggtaaggttggcactcgccgagtagcgggcgggctgacttagcccaaggtcaatgcgtcccttgaactcccgcgtgagactgcgtagcctacgtatattgatgcggtcgccatcgacgccgccccgcaggacctcgatgcgccagatcgactgcgcagggaggcttgccagctcttcggggctggcaggcgctccatctatcagcacctgagcgacctgctcgctacccaagatactgtagcccgcgctccccataaggagtccaggcacatagcgtagcgcacggtcagcggaggcacccttcggcacgcccttcgcctcaagctcaaagatctgcttgtggatattgcccgtattgatcttgcgatagccgatgacgctgacgccctcgagctcgttgtcgggggtcgcgatactatctgtcgtgggctgctgagccgctccactcaggcgaataccaaagaggagggcaacgataaggaggcgcgtagcctctgggatgtgcttcttcataaggcccttgattcgggaagatatttgtcatgcgtgcgccctcatgaggggcgtgtgtgtactacaaatttagaaaaagaatagaataagtagatctcctcagcatcagccactttgcaaggagcggatactaaccaatagtggtgggtggtgtgaacctatataggtcagtgagcgaacctatattggtcgcatcaccgacctatataggatggcgcagcaagctatatagctttgtgaagtgacttatattaggttgttgctccgcgtagggataaaagttgtggacgagtggcagataagtttggactacgtacgtggacgataaatctacgtgcgtggatatttggactgacgtgcctggtctttaagactacgtacgtagatgcggaaaaaccactacgtgacggcgctttttccttcacgagaaggacacttttccctccgctggataagaggaatacgcgcgataaggcgaagggcttgcttatcacgtcggagaggcatatcggggagctgggcgtgcgataccttagctgaataaatagcgggcaggactctgccgcaacagtctcatataggttcgcaccaccctatgagggaggtgcacagcttgcacacggccacaaaaaaagttggcacccgcagatgggtgccaacttctctatgaaaataaggagggagcgaggcgggtgctatcgcttgtgacgctcgaagaagcggcgggcaaagtccttgcagaccatcggcaggcgtacgagcttgtcagcgggaagcgtggagcgacagcgcagataataggtgcgctccagctcggcttcgcggacgtggaagtccagcatctgctcgaggtgggtattcagctcggcttcggtcagcgtcttgtcgccctgacgtacacggcggccgagggtttcggtcgagcgccatagagcgaagcgcttatcgtcaagttcgtttagcacgggcatcagtgcatcgacttcgccagcggtgagggagagctcacgcatcaggaaggcacgcttctcagcacgcaccttctcgcgcatatccttatgatggtcggcgcccttcttcttggcttgtgcggacagtccacccgtcaggaggatattatgggcttgtgctgatagtccacccgtcaggaggaggatggagcaaaggatataaaggattcgcttcattgtcttcgtaggggttagcgtgtggtcgtaaaggaggtattcgtcatcgtcccgaggtcagagaggagcgaattgtagtaggagtcatagcctgctacggccgtcatgcgctcaccgtagtcggcgtagtagttggcatactcgtcttcgctactgacctctgtctgggccgtagcgacggacttatcctcggcagtcttcggtgcgaaggcacggaagatgaggttcatcgcgacgaacatcgccgccagataagcgatggggcgcaggcgcgtccataggctgacacggggagcttcggcgacttcctcgggggtctcctcagggatattcgccatgatacgctcctcgaggctatcgaagtagccctcggggacgctatagtacccacgactctcggcgggagtaggtaggttgggttgcttattcatctctaaatatatgcgcccttatcggggcttcactctgtgtgacaactcgtaggggaaaaggtttattcgctgcgctgaagttcttctgttaccttcttcatcgcgtggtggtaggaggccttgagtgcgccctcagacgtgccggtaagtgcagccatctggtcatagggcatctcgtcgtagtagcggaggcggaagaccaactgctgcttggcaggtaggctcaatatagccttctgcaggcgcacctctgcctcatcggcatcgaagtactcgtcggccgtgaggcgatccagcaggtagagcgagtcaccctcctccgagggggagatgacattctcctcttcgtggcgacgcttcttgaggaagttcagggcctcatagagggcgattcggtagagccacgtggagaccttcgcctcgccacggaagccttcgatagcctcccaggccttgatgaagacgttctgcacgaggtcgtcggtgtcgtcgtggttgtagaccatacggcgtatctgccagtagatctgctgcgagtagaggtgcacgaccgtggtgaaggcgcttcgccggcgctccgggtcagccagcgcacgctggagctcctcttcagtgacaagtggttggggcatcgtcaagatttctttgacttcagggtagcaggggctttctttgcttgcgtcgggctatcggcagtacggctggactggatcgtatagacgagctcgccgtccttcccgaggctgacgacgaaggtctcacccgtatggagcttctcctcgaggatgtgctcgacgcaggggtcctccacgagctgctgcagacgacggcgcacgaggcgggctccgaggctgcgatgcgcctcatcgataccgacgaagcgcttggcttcctcagtgagcgtcaggccataacccgaggctgcgaggcgctctacgataggcttcagctccagcgagacgatctgcaggagcgactcatctgagaggctctcaaaggcgaccgtaccatccagacgccccaagaactcggggctgaaggtgcgctccagtgccttgcggacaatgccttcgctacgctcctgcccattgctgaggccagagaagccgacggagcgggcaaagtccttcgcttcgcgcgaaccgacattgcttgtcatgatgatgatcgtattgcggaagtccgccgtacgcccctccgagtccgtcagacggccatcgtcgaggacctgcaggaggagattatagatatcgggatgggccttctcgatctcgtcaaggaggaccaagcgatgggggcgagtacgcacgggctccgtgagttcgccaccattgccatagccgatgtagccaggaggagggccgatgagtcgggagacgctatgacgctcggcgaactcactcatatcgatacgcaccagtgcctcttcactgccgaagacttcccccgcgagtgccttcgccagataggtcttccctacgcccgtcgggccaaggaagaggaaggaagcaatgggatgctgtccgtcacgcagcccgagacgggcacgctgtacggcacggctgacgactgccacggcattatcctgcccgacgatacggctgcggagcttcgcggggagctcacgcaggcgctggagctcggtcttgtcctcgatctgctccacggggatattgaggcgacgagccaggccctgcaagaggtcgtcacggccgacggtacccttgcttcgtgtgccgcttgtcgtgccgtagaagtggcgatgcaggcgacgtcgggtctcgctggcagcggcatcgaggatctcaccgagggcgtagagcgcaggctcctgcgggaagtagcgctgagcgagtgccagcagttcctcgtagggcgtctgatagctcaccgagtggtaatccgcgaggaaggcacggcgacgctcgaaggccttacggagtgcctcgccctcgaggggcttgatgatgtacttcgccgtgctgagcaaagcggcttcgctgcgctcgacagactggctgtaggtggcgggagtagcgtgggcgatacactgcatacggcgccgagcaaggcccacgaagagagcctccaagacttcgccacccgtacgaccgaggggcttcaggaggctgaggtcaccgatatagaggagcactgatggatcggccttgagtcgctcaaagagtgactgcaggtactgctctgccccacccatcatctggcttgcagaggctaagcgcagcgggtcaagctccagcaccgactggtagcggaagccctgtggcgtggcactcagcttatcagctacactcgcactgccacccttagcatccagctcagcacggcgatccatgtgacgaacaagcgccttgatgatcggctcggggctgtcatggagctcatgcaccaagacgaccgaggggtagctctcacgcgagagtatctgtatgaggtcacgcgcttcatcatcatagggcatcggctccaccttaccctctggggtcgcgggggtagtgctcgtcacacggcgaccgaagtcagcgtaggggaagctcccatccttcggggcttcttcgccctcggggagcttaccgagcatgcggtcgacctgcgtgctgatactctcggcgagtgcctgcaggagttcgtcgctgggtggcagttcaccatcaccaccgagcccagagcccttcatatgcgccagatctatgcgaatggggatacggcggacgcggtcttgggacaagacgatcgcctgggcctgcgctgaaggtttatccgaggcgggctggcttggcttgggctctacgagctttggagcgctctcctcagcggtagtcttactgccctcaaggagcatagcgacgcgatggagctgggggtcggtatgctcgttgatgcggtgggctacgaggtaatgcgtgaggagcgtcgggggcgaacagaagtataggctatagaggaggtgcagcgcactgatggcctgcgccccgaggagcgtggagatctgtgccgcacgcgccagcgtgctatgcgcttcgatgctgtagaagacgtgtgcggggtcttccttatcgtccggctggatatgctcgtccacctcgcgcagcacctccttcacggagatattacgatccatcaggaagcggatagcggcgctggtgccttcgctgagcacgccccacaggaggaggtcattcgtgatctcgccacagcgcagctccttggcgtgctcggcagcgagctcgagggccgcacggaaggtatcggtatagttgtacttgacaggattacgcttcatctctgtgtccgcttaggatttgacttggatagcatgcagcttggcgtagtgtccgccgagtgcaaggagctcgtcgtgcgtaccctgctcgacgatacgcccgtcatcgacgacgcagatgacgtcggcatggatgatcgtcgagaggcggtgggcgatgacgatggtcgtacggccctccatgaggtgatccaaggcactctgcacaaggcgctcgctcttggtatcgagggccgaagtggcttcgtcgaggatgaggatcgggggattcttatagacggcacgggcgatagagaggcgctggcgctggccaccggagagcttgcccccgcggtccccgatattcgtatcgtagcctgcgggcatctcattgatgaactcatcggcgtgcgcgacctcggcagcctgacgcaccttctcgagggtagcaccctcgacaccgaaggcgatattctcaaagaccgaggcattgaagaggatgggctcctgattgacattccccatgaggcgtcgcagatctgctactgcgacctcacggatatctgtgccatcgatggtgatgcgcccctcgacgacgtcgtagaagcgtgggataaggtctaccagcgtgctcttccccgagcccgaatgcccgacgagtgcgacggtctgccccttgcggatcgtcagatctacgtcacgtagtacccactcctcagcatagcggaaggagaccttctccaggcggatcgcctcgttgaagacgacgggcttaggctcggcagggtctgtgatcgtgctctcggcctggaggatgcggtcgacacgctccatcgagcccataccacggcgtatagcataggcacccttgctgaggtccttcagcgggttgatgaggctgtagaagatgacgagatagtagatgaaggtcgaggcatcgatgctgctatcacgattgaggatgagcgagccgccataccacagcacgatagcgatggtcgctgtaccgaggagttcactcacggggtgcgccaggagctgacggcggttcacaccgatgaccgtctggcggtactcctcgttggagtcacggaagcgcttatcgacgaactcctccgcggtgaaggccttgacgatacgcagcccgccgagtgtctcctcgacctgactgatgagctgcccccactggttctgcgcctcgaggctggtgcgcttgagcgacttccctacgcgccccatgacgaagcctgcgatgggcaggacaaggaagacgaagagggtgagctgccagctgatgacgagcatcgagccgaggtagacgaagatgaggatagggttcttcagaaggagatcaagcgaactcatcacggagttctctacctccccgacgtcccccgtgatacgggccagcacgtcgcccttgcgctcttcgctgaagaagcccagcggcagagcaaggatctttgcattgagctgattacgcaggtcacggacgactcccgtacggataggcacgaggaagaagcccccgaggtaggtagcaccgaccttcaggagcgtcatcagcaccagatagatgccgaggatgatgagtgtgtaggaggctccctcagtctcgatgagccgcgagacgaagtagccgaagttattcgtcaccacctccttcatctgcgaccaacccgtttgggtggtgaggtcaagcgagctgaaggggatataagtcgtcacccgctcctcgatctggaagaggatattgaggatgggcatcacaagggcgaaggccaccagattgagcagagcgctcaggatgttgaagagcaccgcaaggctcaagtaccccttataataaggagcgatgaagcggcggatcaacatgaatatatctttcatctatgcatcttagggctcacgcaccgagggcttttactgggcttagcttcggcacggaggctacttatccaaatgtaataatcttatcaaagatacgacaatgccgcggcttcctcccgagccgccgcattcgctgtgccgccaaggcaataccaacacccactctccctctgctattagatacacttcacccccctacagcaagcatagcaataggggggtgaagcactatttaggagtgaattatcagctcttacgtatgaggagatttgccaaagaaacccagctctttgcaccagtagaaactatagggttaagcccccagaagcgcaaattacctgtatcttcctgctccgttcgcagcacaaagtctcggcacagatacttcgaagacttaaggctttggaaagtccatagcccagtttcctgcatacgcgcataccacctggtcattgaacggccttcctcctcaaagatcttgtaagaaccagcgtcaatatatacgaaggcctgctgactctcatagcgagggagcattacattcagataggtcgactggtaagggatcagctcataggtctcggggttagataagacatacattgtactccccagttcgctgggtcgcaccaagtctaagatcccagagaagtactttaccttcagcggaatatctgagataagcgaagggatcgatggattcccttcttcaagctctaagaacgtcgtgtgcgcattggcattgatctgctcttggaagagacgctgatcataccgccccaccgtatgatctagatctatgaccgagctgaggtttggctcgtacttacttccagactgtagataggttacccccaactgcgaaaagttgttgctcaccttcttctggagctcaggaaataggggcattcctcctacccaaagcgcaccatgaatagccatgacttcactctcagtgaatagtgatgagttagcagccacggccaagtcttgagaggcacccgtggaatatgaagtcacgacatgcgtcccatatttctccaccagcgcagccgccgaaagcactttaagatctctcacgaaacgcttacttagatagaactcatagtccatcggatctgctacttcatatcgctcgtagagatatttataccccgtagtatagcgatagacatatcgctgcaggctccctacagagtatctcctattaccataagagcaagtcaccttctcatagcccggacctaccgctacgaccattgagtcactgaatggctcagccttggaggcctggtaagtccgcttaaaggagcggtcctcaggctggacactaagctcggtatgccgtggcacacgaagctcaggggtaatagcccgaccaaaaggagaccatggatcattagaagcgatgcgcttctcatccaagacactccaccgcgtgaagcccccagcatcattagccgtatgtcctacaaggtcgaagcacttccccagatagcgctctgctggcaaggtcttaggctctaccccatggaggcgcatgaaggtggggtaagtaccctctgatgcgatcttccgatctggtgatggacgatctggatcatccttctccttacaggagctaatgccgagagccatcaaggcaaccaaagccaaataggaggagttccttagtgctttcatctctatgaaatggggggacttaatatatatacgtattggacaggcgaggcagctcctcatagggaaggcataactctacttttctcgacgcaaatatagtacatacttgaatacatcggagcatagtacctacggcttcccctaaagcggatcatagggctatccacagcacgggactatggcggagaaacggctactcgcagggggagaaagcgacggggccactaccgaaggatatcgggagtggccccgtaaagaggtattcagcgaagcgccgaattacttagcgttcttagcgaggatctccttgaccgtgtcgatctcgagcgagtgagcagcacccgactgaccgatcgtaccgctcatataagcagcctgcgtgtcttcgctgatgaggcctgactcgatgaagctcttgatacctgcagccagacgtgagcctgggcaagcagcgtcttcagcgtagtgagccgtcacaccgtagctgagagccagctgacgagccagagtaggatcgtagcagacagcgcagacggggaccgtagcacggaaggaagagaggtagcgagccgtacgaccggtgaagctatcggtgatgatagcctgcgtgtcgatctgctcgacgctacgtacagcctgcttagagaggaaggccgtcgtggtgctcacttccttagagtaaggcacttcgtcgttgtattcgcgctcgagggtcttctcagcctcacggatgatgcttgccatcgtctggacagcctcgagggggtacttaccgttagccgtctcaccagagagcatgacagcgtcggtgcggtagtagacagcgttagcgatgtcgctgacctctgcacgcgtaggcagggggttgtcgatcatcgtgtggagcatctgcgtagcgacgatgacgggcttcttagcagcgatacacttcttgatgatcatacgctggatggaggggaccttctcagcgggaacttcgatagcgaggtcaccacgagcgatcatgataccatagcaagagtcgatgatctcgtcgatgttgtcaacaccttcctggttctcgatcttagcgatgatcttgatgtcgctcttgtgctcgtcgaggatcgtctggatctcctcgatgtccttcttgttacggacgaaagagtgagcgatgaactcgatcttctgggggatagagtgcaggatgttgccacggtccttctcggtgagtgagggcaggtcgatgcgtacgccagggacgttgacgctcttgcggctaccgagcttaccgttgttctgacagaccgtgaagagcttgtcgccttccttcttctctacgtcgaaggcaagagcaccgtcgtcgaggaggatgcgagcacctacgggcacgtcgtggacgaagttcacgtagttcacgttgatgacttcgttgttggtcttggcttcggggttagcctggaagatgaccttgtcaccagcgtggaattcgcgcttgacttctgagtcaccttcgaggaccgtcgtgcggacttcggggcccttcgtgtccaggaggacagcgacgctgggcgatacagcacgcgtattgttgatgacctgggtgataccctccttcgtcatgtgggcggtgttcatacgtacgacgttcacgccagcttcgacgagcggacggatgaattctacgtcgcagcgcagatccgagatagtagctacaatcttagttttcttcataatgcttaattggggtaatttattcgtgggtcggtagaggtaagcccccacacacggcttcgatggctaagcggtatccatcgagaccgaagcccgagatcgtccctcggcaggcctctgcgatgagggagcgctggcggataggctcacgcttatagatattggatatatggacttcgatagtggggggagtgatagcccggagggcatcggccaaggccaaggaggtatgggtataggcaccggcattgaggatgatggcgtcagcgccggcatcgtgcagctcatagagcctgtcaaggagcgccccctcatggttcgactggaaataggtcagacgaagctggtgatcatagcgctggtgcagctgctccaggcaagtgtccatcgacatcgtgccgtagatgctgggctcacgctggccgatccgagcaaggttcggcccgttaatgatctctatccacattcgttatttcgggggtattcctattgtcttcttacctttgcaaagataaattaaaattctcactttttgaatgctccctgacgatatacgcacgcagttcctctcgcacctacgcttcgagcttggcctctcagagaatacgtgtgaggcttacctcagcgacgtcgataagctcctcagctacatggacgtcgaagggctcagcatcgaagccatcgactatccacggctgcaacacttcatcgccacactccatgatctgggcatcggcccgacgtcgatctcacgcatcatctcgggtatccgctccttcgggcgctatctcctcctcgagggctatgtagatagcgaccccacggcactcctcgaggtgccacgcaaggggcgctatctccccactgtgctgacgaccgccgaggtcgaccgcatcatcgaggccgcagggagcaagggcggcgtcgagggtcagcgcaatcgtgccatcatcgaggtgctcttcagctgcgggctgcgtgtgagcgagctgtgtcacctgaccttccccgacctcttcctcgacgaaggctatctgcgcgtacagggcaaggggagcaagcagcgcctcgtcccgctgagtgactccgccatcgccgaggtcacccgctacctccgtgatcccgaccgtgccaccccaaagcgaggacaagaggactacgtcttcctcagccgtcgtgggcaagccatctcccgcatcacggtcttcgtcatggtgcgcgaagccgccgagatggcaggcgtggagaagaagatcagcccccacaccttccgtcacagcttcgccacagcgctcctcgagggcggcgcgaacctccaagctattcagctcctcctcggtcacgaggatgtagcgacgacggagatctacacgcacatcgaccgcaccaagctccgcgagcaggtcgagcgctatcacccccgcaatcgcagagcgaggtcgtagcataccacctcaccccgacataccaatagccaagaggctggagagcatagactctccagcctcttgtcgcttaacatcattgggtgaaggctactccctcacgatcgtgacgtatagatacttgatgaggtccttcacgcggaagcgccctacccgctcggctccccaagtaaagtaggtgaacgatacacgctccccgtcttctgaccataccgccgtcccgggcttgatgacgatccaatgaaggcgagcgatacggttacccttggagtccgccttgatcagcttcgagtcaatgagcagaaacgatcgggtcggcttcctcagcgcttcgatgatcgctcttctgtgcactctctcggagccccagcccacgaagctcaacctctgtacaaagcgctcgtgcgggtagatgctcctcagccaatacagcatatctttcggcggactaaacagcgctaacggcccagccttgccatccaccccgaagagcatattccgtccctctcgcatcgcgcctaagaacatccagtcaatgcccgagatcccttcacgggaactccctcgcagtcccttgcttgcctgcagatagaggtccccgacagcacatatccccgtctcgtagagggcgagcatagcggatatataagccacaggatccgtgagcatcagatcgtaggcaatagccgcagggccgcaaagctcagtaatcccttgattggggaggggataggacaaggtagtcccagcgtatgggtaggaccgtaagcgatccgcctcctctcgggacatttcttgccgacaaaagcgtgcctgcatctccagcttcacctgctcacggctatagcactcccagacgcgcggggagggctctgggctctcagccaagtatgtcaggaccttcctccctaccgcaagggcatcaagaggctctggggatggatctgtcggcttcattgtattcataggacgctcatcatacgaccttgtatcatcgcccaggtgcggtaggcaccccaggtgaataaatatcgaccgcaaacatagcgatattatccgtactactataagcctctcgagcaaagcaggcagtagccagccgtcttgtgatgccttacgcacttcgccccacattgtgtcgggacaatgtggggcgaagctgtttcttttgggtggctatttagccattccgatacgccgtccattccttgcccaggcgctgaaggaaacgctgggtcaggagcgcggccttggggatgcctatgacaaggactatcagaacgagaaggctttgcagtggattcatcgacgccacatcctgggcatctgcaaagaagagtagccaggcgagggtcgtataggcgaccattaggaggattctactcatcgcttaccatcgtgctaaagggttagtaatcggtttactctccaaaggaacgccttttttcgcatttcacaaaggcctccacttcctacggcgacgctgtccgttcctgcggtcgctcgacgacaaccaagcacaggacttcttgccatccagccgaagaaaagctgtccacgactacgcctaatcctccgtccacgtacgtggtcataaagtctatgcacgtaaatcctatgatccacgtacgtagatttaacgaccacgtacgtggacaaagctttctctgtagtggtatgcagttttccacgaggtgcgtgggaagttttccttcgctcgctgggagtagtccgaatagtcaagcaaagccgcttgcactatgggagtaaagcgacatcgccccacagattcggcgaaatctgttggggcgatgcttgattctttgcttcggggagaagctggaggcgcttactcggcttcgggcgtatagccttcggcagggcgcacgggcttcccgatgagggtcgctgccgtggcggactcgatgcgtacatccacgtactgaccgacgcggtagccttgcttgtcgaagacgacgaccttattctgctggctacggccgaagagctgttcgcgagagcgcttgctgaagccctcgatgaggacctcgaaggtcttccccacgtcacgcaggttgctctcgagcgagagctgggtctgcagctcgatcatctcgttgaggcggcgaatcttctcgtcctcggggatattgtcgatgaggtacttggcggcatacgtcccggggcgctcggagtacttgaagaggaaggcattgtcatagaccacctcacgcataaggctcagcgtatcctggaagtcctcctcgctctcgtcgtggaagccgcagaagatatccgacgtgatggcgcagtcgggcatagcacggcggatagccgcgacacgctcgaggtaccactcacgggtgtagttgcgcttcatgagcttgaggatgcggtcgttgcccgactgtgcaggcaggtggatatgcttgcagatattcgggtacttcgccatcacagcgatggccttgtcgtccatatccttggggtgaggcgaggtgaagcggatacggatcttaggcacagcgagggcaacctgctcgaggaggtcaccgaagtcatacgtgcggtccccgtccacaaagcggtaggaattcacattctgcccgagcagcgtgatctcacgatagcccttggcctcgaggtccttcacctcacggatgatgctctccagctcacggctacgctcgcgaccacgagtgtagggcacgatgcagtaggagcagaagttattgcacccacgcatgatggagacgaagcccgagaggttgagtccgccgatcttcagcgggaggacatccttgtaggtctcggtggtggagagctgtacgttgatcgccttctccccgcgctcgacagcgccgacgagattcggcaggtcgaggtagctatcggggccgacgacgaggtcgacgtggtgcttctcgatcagctcccccttagcacgctccgccatacagccgaggacgccgatgatgatacggcggcgcttcttgcggcggatggagtgatagtaagcgatgcggttgaggactttctgctcggcattgtcgcgcacagagcaggtattgaggaagatagcatcggccaactcagggtcttcggtcaggtgaaagccgtccatctgcatgatggatgcgacgacttcgctgtcggcgacattcatctggcagccataggtctctatatagacgcggcgggcggtggcggtcgaaggctgagcgctctgggcgggctcgatcttggtcatgaactatatgaattgcttaagtgacggtgggaggtgcgtagaccttcttaagaaggggcttctcccgcagttggagataatatatttatctgtatatttgcaatgaaaatgtaagatttttcatagttaaggttttggttaataggttggagctggctgggaagtcagctccgcttttttatacctataccaagaccttctacgatcttcatcccatgctatatatcaaggggcatcgccgatacgcaggaagtgatagccctcactctggagccagcgcacggcttcgggcatcgctacgcgcatattcttctccgccttgagcgagtcgtggaagacgatgatcgagccgttgcgcgcatagcgcttcacgtagccgacgatggtctccgggctgagctcggcattgtagtcgcgcgtcacgacatcccacatcacgatctcgaagctatgactaagctccctattctgcgagaagcgcaggtgcccgtgcggcggacggaagtagcgtgagtggatgagctcatgcgcgtcatacacgtcgcgcatgtactccttcgtcgagtggaagataccctggatatgatgataggtgtgattgcctaccgtgtgaccacggcgacgtatctcctcgaagagctcggggtagcgtcgcacattgtctgccacgcagaagaacgtggccttgatccctaactcatcgagctgatccaatacccaaggcgtgacctcgggtatcggaccatcatcgaaggtaaggtagatactcttgcccttgagcgcggggatacgccagcgcgctccaggcacgagcatgcggtaccacataggtacccgacagaggatgcgctcgatcatcggcggaagagtggactactgagctacgcccagacggcggagcagtgctgcgatctcctgctcatagcgggagagcgcctgcgagttgtagtccttagcgaagtcgagagcgtaagagatcgccgtataagcctcctgcagctcaccatggagtgagacctcctcgagcctctctttggggagctgtaccgcccaggtcagcgtgctcagcgcacggcgggcgatagcctgcagcacgtggtcagcctcagcacgcatatcggcacgatagagggcatcagcgaagtagagtgcgctcgtctcgtaggggacgttctcctcgagaatgacggagagacacttcttcagtatggcctgtgccttctgcttatcgccacgctcgagataaccattcgccagaggcgtgaagatctgattgcgcagggtcgatacgatgccacgggcgttctcatcgaagtacgtacccgggcgatcagcaccgcaccagcggaacttcgtcatcaccgtctcgtacatacgatccagattgccgatgccgtagtcgatagcacggcccgtgctgtcgacacgtggagcgagcgggaggagctgcgaagccatacccgtctgcaccatgctggcggtcataccattgaaggcattgcggggcgaggtgatcgcccagtagataggacgctcccacttattgcccgcgatgaggtcaagtacgctgaggccaccgatatcgaggaactgacggccgtgcaggctcagtgagaagtcgggagtgatatgccccgtgagtgcggggaagctcttcgcgatgcgctgagcgacagcagccgagtcgacggcgacgtagaggtcgggcgagggcagcatagcaggcgaaccagggccatgaccctgcagtgccttataagcctcctcgacgctctggcgctcaccgccattgggactgacgagagcgtagttgttgtagtaataataggacttgggcaggagaccgatgggcagaggcttgccttcgtaggcctgcttcttcatctggtcgatgtaccagtcacccgagagataggagagattgacggtgcggacgtccgtgcggatgccctcgacttcctgtgcgtaccagagggggaaggtatcattgtcaccatagcagaagaggatggcattcggctcacagctctcgaggtagttgcggcccatatcgctggcgacggtgcgacccgagcggtcgtggtcgtcccagttctgccctgccatctgtatggggatgagcaggagcaccagcgaagcgacacctgcagcagccgtagagatggtgacaggcgcgtcctcatcactggtcttcttcgcaggctgcttggagagatagcggctggcggtcgtagcgatagcagccacaccgaagcccacccagatagcgaaggcgtagaacgatcccacataagcgtagtcacgctcacggggctgaccaggatactggttgagataaagcacgatggcgatacccgtcatgaagaagagcataaaggtcacccagaagctctccacaccacgacgcccgcgaccgatctggaagaagaggccgatgagcccgaggatcagcgggagggcgtagtagacattgtgccccttattgcccgtcatatcctcggggtgcgtatcgctatccccgtagaagaagctatcgacgaagggaatacccgtagcagcgccaccacgcaggaggccgccgtcaccctgaaggtcattctggcgcccggcgaagttccacataaagtagcgccagtacatgtaggtcagctggtagttgaagaagtaggtgaggttgtccccgaaggtaggctgcgacatatcatcggcagcacgccccatccacgtattgtacatctgcgcatgaccacggtcatagacacgggggaagagcatcatgctcgagccctcatagacgggctcatccttgggcgcacgtgctacatagcggtcggggtcagaaggctgagccttatcgacacgaccgtaggtaggctcaccttcgtcgaactcaggacggccgtcggcgccgtacttatagggcgacgcgaaggtagggccgtagaagagcggtgccgagccatactgctcacgcgccagatagtagcggagcgagaaggcatcagcaggcgcattctcattcatcggagggtcagctaccgcacgcacgaggatcaccccgtaggaagagaagcccatagcgatagccacgagcgacatctgtaccgtctggacggcacgtgcgcgaagccccttatataggtagaagaaggcaatgataccagccgccagtgcaagggcgacgataccattcccgatgagggggatccccatcaagatcagcgacagagcgatagagatacggaagcgatgtgagccgaggagcttgggatcctgcaccgcacggtcggcttcgtagacaccccagatgaggacagcgacgagtaccgcgaggtagatatacagcccttggttgtagctgaggccgcaggtattgacgaagaacatatcccacttccctgcgagcttaggcacaccctgcacgaccccgtacatcatcagcccgacgagggcgaaggagccgaggagcgccagagcactgcccttgagcgtgggtgtcgtggcacggcggtagtagtagaccagcgccatggcgggcagacagagcaggttcagcaggtgcaccccgatactgaggcccatcagataggcgatcagcaccagccagcggtccgagcgctcgtactcgctgcgctcctcccacttgaagatcagccagaagaccaccgctgtgaagagcgagctgaaggcatacacctccgcctcgacagcgctgaaccagaaggagtcggagaacgtgtacaccaagctacccaccagaccagagccaaggatagcgatagcctgccccatcgtcatcacctcaccagtgggctcaaagccctgcttgccgagatgcgcgcgaggcgtcagcacacggcgtaccatatgggtgatcgtccagaagaggaagaggatcgtgaggccgctcagcacggcactcgtggcattggtcatcagtgccgcacgctcagggctaccgcccagatgcgagatcacattatagaccagcatgtagaagggcgcgccaggagggtgcccgatctcgaacttgtagtcacaagcgatgaactccgcacagtcccacaggctcgctgaggggccgatcgtgagcagataggtgagcgtagcgactgcgaagatcgcccagcccacgaggttatttgctcggttaaattgcttccaattcatgtatatctctattagatgtgcgacccgccacgaagggtcaggacacactacaatgcctacaaagatagctatataggctgatacctgccgtgccgaggcaccgccctatacagcgagagcgggtactactatgacgtagcactccatttgggattcgccccatgggagcattggtatcaaagatttacaagcgctcccatcgctcaagtctccaagtccgatcgatgagtttgtactgagcggacaatgtggtctcggcatcgatagcccagcgtaagtcctgcaccttgacaccgtcagcctctgtgaacgtcttgagactgggtggaccaaactgctggatcgtctgctcatacgtgtagtcctcgatgacagacagcctcagatgaccatcctcatcaggcagccatagatgctcgatcaagaacgcctccatatctacgatcacctcctctaagacgggagacaaggcgggtaacttacccttatatcccctgaccttatcacagaagaaggggaagaagtatcgccccatgatcaaccgctgcatcgtcttattctgcttgtagggaagaaagtcctcctctggcatcatcaagtcaagctccagaatacgatctaccttatcgaagcgtactctggagcggatgccactcaaggtatccaatactctaaagcagaagccaaaatcaaaatccagctgaggatacttggcattcaacaccgaggtgaaagcctcctgttcatcagcaatatcactaaccatcaagaatccaggggagtctgatgtaattctcacttcgctcatcggcccaatctttaacgaccttatttttgctgcagacactccacagtacctacgattatacagcgagagcgggtactactgagatgtagtacccgctctcttggtgaccccggtgaggctcgaactcacgacccagtgattaagagtcacttgctctaccaactgagctacagagtcattttcccttgttcgactcaccaccttggtgcgtgggagctttttcagaacgggtgcaaaggtagtgcaaacatttgaattacacaaaacaccagccgcaaactcgtcaaaaaaattcccgacagacctctccaaagtgacacgcaagcccttcgccttatcgcgcgtattcctcttatccagcggagggaaaagtgtccttctcgtgaaggaaaaagcaccttctcgtagtggttttaagctgtctacgcacgtagtcttaaagaccaggcacgtaaatccaaatatccacgcacgtagatattagagccacgtacgtagcccaaacttttctgctactcgtcgacaacttttatcccctacgcggagcaacaacctaatataggtcacttctcaaaggtatatagctttcttcgccatcctatatagctctacccacgtactcatataggttcacaccaccctctcccacacatcgtcacagcccttcagcaaagatggagaaaagtaagccccacggcaggtcacttaagtgacgagccgtggggcggatacttaatatatggggtgccggcttactcgcgccagtagcgacgctggatgcgcgtcgagagggtcgtgaggatctcgtaggggatcgtgtcacaggcttcggcaagcaccgtgatagggcgctcttcgccaccgaagatgaggacctcgtcccccacccgtgcctcgggcacatcggtgatatcgatcatacaggcatccatacagacattgccgatggtcgggcacagacgcccgtgcaggagcaccgaataagcgccacgactcagacggcgcgagaagccgtcagcataaccgatagggatgactgcgatgcgtgaggggcgggaggtgatgccacggcagccgtagccgatggcttcgcctgcggggagctcacggatctgcaggaggacggtcgtcagacgagcgataggctctaccccggggcgccccgtagcactcaccccatagaggccgatgccgaggcgtgccatatcgagagcgtattcagggaagcgctcgatacccgccgtattcagcaggtgacgcttcggctgatagccgagggctgccgtaagggcttcggtagcggcgatgaaggtcttcgcctgacgctcagtgaagtctcgcttgtcaggctcgtcggcagcggccaggtgcgagaagaccgagctgacacgcagcttgggatgctcacggagataagctcctacggcagggaggtcagcaggcgcaaagcccaagcggtgcataccgctatcgaccttgagatggatagggaaggcagtgatacctgcgatacgtgcgcgttcgcacagcccctcgaggagctccatactatagacctcgggctcgaggcggtgcgagaagagggtatctgccaccgacagctcggggttcatgatcatgatgtgcgtgcggatgcccttgccacgcagctcacgcccttcgtccgccacggctacagcgaggtagtcgacgcggtgctcctggagtgtacgcgccagctcaaaggcccccgtcccgtagccatcggccttgatcatacagatgagcggatgctcgggtggcaggagcgagcggtagtgattgaggttgtgcacgacagcgctgaggtcgatatccagcaccgtctggtgctcgcgggaggagagacggcggtagacttggtcgagagcgaagcggcgtgcgcccttgatgaggatacaggagtcgtgcagacgcgacaggaggggagaagctaaaagctcgctcgtcgtcgcgaagaagtgcgtatgccctgcgtcaaagagtgcagccgaggccgtgagatgctcaccgacagcgaatacttcgtccacgccatagctctggatgaggcctgcgacctcggtatagaggtcggcatcactacgtccgctcccctcgatatcggagagcaggagcacggggcgagcacccgtagccgaagcacgacggcgcaggaagtccagcgcaatggagagcgactgcaggtcacagctgtaggcgtcatcaatgagggtattgccctgcaggccgtccttgacctccagacgcatcgagatgctggtgagggtgcgccacgcttcgggcacagcgaggagctggggagcgagggccgccacgagggtcagacagcaggcgacatcctcgagataggcggcatcggtgaaggggacggtcagcggatattcttcgccagccaccacgcagacgagcgctgtcgtggtgctcgtcgtctcggtcgtgcggacatagaccgtggcggcaggatcctgatgactccaggtgtagtgggacttcgtggggaagcgctcacgcattgcctcagcgaccagaggcgtatcgaggctgtagaagagcgaggaggagcgctcgaagaggcggagcttctcctccagcttctcctccagcgaggcgaagccctcctgatgtgcgctaccgagcgaggtgaagacaccgagctgaggcgcgatgacttcttccagcgcagccatctcaccggggcgggagatccccgcttcgatgagggcgacttcatccgtagcggtgatactcagcacggagagcggtacgccgatctgcgaattgtagctgcggggggagcgcatcgtatggaagcagggcgagaggagctgatagagcagttccttgacgacggtcttcccgttgctccccgtgataccgatcgtatggagcaggggaaagcgctcgcggtgcgtgcgtgccagcgcctgcaaagccgtgatagaggaggtgacgacataccagttgcacccgctatacttcgcctccgtctcgctcgagagttgctcgacgacgaagctccttaccccacgctcatagagcgactcgatatagcggtgcccgtcacccgactccgtgcggatggcgaagaaaagcgtctcctcgggcgtgaggagcgagcggctatcggtgagtatatggctcacagccctgtcgtgcgacagatgcggcgtgaccgcaaaggccgtagcaagggtggcgggagagaaggagggggaaactaatctatccatgtgggtaagtcgtgaagctgagcggaggggtactgcgagcggaaggcggcgacgcgctcacggagagcggcgaggcgtgccgtatgctcggctccctcagcatgtaaagggcggtgacgaagctcttgatgcaggcggtgcgctaagggcaaggccttctgcaccgcttcgtcgagtgcccacgcggtgaagcgctcggcgacgatacgctgtgccaagggggagggatgcaccatatcctcggcgtagaagcggtagtcgcggagctcgtcgagtaccaattcgtaagaggggaaataaaagcaagtcgcagggaacagctccgtgagtgcctcggagagaagcaggagcttcgccttgctgagggcattgccgtgggcaccgtcacgcagatgacgcacggggctcaccgtctgaatgatcgtcagctcggggaagcgctcacgaagacgctcaatgagtgggcgccaagtctgaagaagcgtctctaagctcacgcgctcacggacaaacgtccgctcggggagcttgtggcagttgctcactaccctacccgctactccgccatattcgtcacccgccaggcggtagacaaaggccgtgccgtaggtgaagaacaggtagcgtagctgagggagcgccgtctgcaccgcttcgtacgaagcattcatcaggcgaagggcttcctccgcctttggggcagagaagcgcccatgatgaaggaaggaatggtagagcccgccatgctcgaagaggtcggcttcggtgaagggctcaccaaagaaaaggcgctcgatgccggctgctatcgagaggggattgtactggatgcctaagggattgacttggagctgcaggcctccatcacggaggtaagcgccgatatgctcactgaagcacgagccgaagctgagggcttgctgcccgtagcccaagcgtggaggcgagggcggtagcgtgatcggagtatggagctgaggcataggcagagcgaatatctatgagcgaaggactaccgatgagggcgccccgacttgcgccctgtgcgatgccccgcgagctgcgggtagaaagccgagagaatatgctctatcgtgtagctcccatcagcctctatatcgagggcgaggatatcgtagcgcacctccagatcgagggcacgctgacggatgtaggcattggctgcggagatgaggaaggcttgcttctctcgggtgacggtcgtgcgagcttcggcgaagctcccggctccacgcgtcttgacctcggcgatgacgagcgtctcaccccactgggcgatgatgtcgatctcacgatgctggtggcgccaattccgctcgaggatggagtagccgtggcgctccagatagcggcaggctaactcttcaccagtcgcacccgtcttgagatgttggtccatagcagatcgctctgtgccttgtcggggtcgaaggtctcgatatggcgcacacgcttgtcggggatgatctcatcgatagcgatgaggatacccgtctcctcgacatggccgaagtcctcgttgatcgccgtgccgaagacacgcatctcgggcgagagtgccatgtaggcattgaccagcggggggatgttcagcccgatctcacgtaccgccttgttcagcgcacggtagttctccagacggtcatccgtggggaagagctcgcggatctcggcttcgtcgacgacgatgggcagcggatcggtggggcgaactaagtgatcggggtcggggaagtgcttgtcgaggaagtagaggatgaggttgcgagcgtggggatcgtagtcctcatacatcgtgaccttaccgtagaaatacttcatcgcagggttgagcaccgtcagcgctccgaggccatcccagaggttgtccagcgcgaagaggctcttagcccccatacgcgtagactgatagagcagggagacgaaggagcgtcccagctcgatcgtcacggggaggtagtctgcgaggaagcgggggctgaactcaaagagctctgccgtcgccaggcgtggacgccccgtggcttcgtccatctgtacctcgtcgccgaacataaagcggtagccaccgaggatagctccttcggcggggtcccacacgatgagctgacgatagccgtcgtcggcgaggtcaaactcatcgacgtcgcagtcacgccccgtaccgccgccgtagaagcggaaggcctcttctcgcaagcgcccgatctcacgcatcgtctcgggagccgtacttgcgtggaagacgtagatctcgttcccacccttattcgtcgcgcgaaggagcttgtcgggggtgagttcttggcggatgagatccgcagagacaggggcgatgatcggtgtggtaaacatcagcgcttggtcagtgtggcatcatactcatcgcggagctggtagctcagcgcacggatacgctgggcctcctgctggggcgtaaggccgctgtcacggaggctctgccaggagatcggctccccgacgatgaccttgaagtgactgccgtgagcacggaagagctcatcgggaaggagggcttgccctgggtcgaacttcatcttcagcgcctccttgatgtgccagatccagtagaagtggcggctattctgcccgacgtagtgcagcggcacgatgtcgcgctcgttggcgatggcctgcgagacgaaggtcttatgccaagggcggtcctgcagcttgccgtcgaagatacgtgagcatgagcctgcggggaaggtgccgataggcacatcggagcgcatcgcctcctgcagcatcgtgatcgactcacggccctgcgagccctgacggttattcaccggcaggaagaccgactggagcgggcggaggtaatacaagaagtccgtgaccatatagcgcacgtcgccgtagcgcttccccagcatgtaggagagggagatgccgtccataccacccagcggatggttgcagacgaagatgcagcgccccgactcgggcaggcgctcggggtgtacccattcggtcgtgacagcgaactcccccatcagagcttcgaggaagtccataccatcaaggtgtccatagcggtagaggacatcattgatctcccgctgatggatgatgcgctcgaggagacgcaggacgaatggggggaggcgcttacccgccttctcctccagcaccttcccgatatggatagccaagggatggtcctgcgaggagtattggggttgctcggtcagtggttgcatcgcgataggattagttgccagagagctggcggatgctctgctcgatcgtcgcgatacggctctcagcgtcggccttcttcttgcgctcgaggctgatgaccgcctcgggagccttgctcacgaagctctcgttgctcagcttcttctctacgccagcgaggaacttctgctggtactcgaggtcggcacggagcttcttcagctcttcctccacatcgatgtaggcagccataggcacggcgaattcgtccgtcccgatgacgaaggtcacagcaccctcgctacgcacgccgctgcggtcaatagcggagaggcctgccatcttgatgaggacttcatcgagctcggtgggatagctggggcttgcctcgaggccaagggcttcgcggggcgagaggttcttgctggtacgcaggctgcgtacggtggtgatgatctcctgagcggcagcgaagcgcgcgaggaaggcttcatcataggcctcggcagggcgctgctgagcgttcatgatgctctcgccatcggcgcgctcggcgaggttctgccacagctcttcggtgatgaagggcatgaaggggtggaggatacgcaggatctcgtcgaagaagtccagcgcctcacggcaggtcgtctcgtcgataggcgagccgtaggcaggcttgatgagctcgagataagaggaggagaagtcgtcacggatgagcttgtagacgagggtcagagcttcgctgatacgatacttagcgaagagatcgtcaagctcggtagccgccttgttgagcacctgacgcatccagtaggaggccagacgcgaggcctcgggctgaggcgtagcagcagcttcgcccgtccagcccttcacgaggcggaaggcgttccagatcttattacagaagttacgaccctgctcgcagagtgattcgtcgaagaggatatcgttcccagcgggagcactcataatgaggcccatacgcacgccgtcagctccatacttgtcgatgagcagcagggggtcgggtgagttaccgagggtcttcgacatcttacggccctggttgtcgcggacgataccggtgaggtagacgttctcgaagggcttcttcccctggaattcgtagcccgccatgatcatacgcgctacccagaagaagaggatatctggccccgtgacgaggtcagaggtggggtaatagtattcgagctccttgttgccttcgctcagtgcgggggcgaagacggtgataggccagagccaagaggagaaccaggtatcgaggcagtcgctctcacggcgcaggtctgcggcggtgagatcagcgttcttctcctgtgccagacgaagcgcctcttcatcacttgcagcgacgacgaagctaccatcaggcaggtagtaggctgggatgcgatggccccaccagagctggcggctgatgcaccagtccttgatgttctccatccagtggcggtaggtattcttgaacttcgcagggtgcagacggatctcgtcattcatcaccgcatcgagggcgggcttagcgaggccatccatcttgaggaaccactgcatcgagagcttaggctcgatgggcacgaaggtacgctcggagtgaccgaccttattcgtgtagtcctcgaccttctccatcagaccagcggcgatgaggtcagcctcgatcttcttacgcacgtcgaagcggtccatgccagcgtaggcgccaccatgctcgttgagcgtgccgtcgtcgtggaagatatcgatggtctggagctggtgcttctcaccgagcatatagtcattgacgtcgtgcgcaggcgtgaccttcagacagcccgtaccgaactcgatgtctacgtactcgtcctcgatgacggggactgcacggccgacgataggcacgatgagcttcttgccacggaggaagtgatagcgctcgtcattgggattgatacatacggcggtgtcccccatgatggtctcgggacgggtcgtagcgacgacgacatacttgtctgcctcgccctcgacgaagtagcgcagataatagagcttaccctgctgctcctgatagatgacctcctcgtcgctgagggcggtctgtgccttggggtcccagttcacgacacgcacgccgcggtagatgagccccttgcgatagaggtcgacgaagacgtcgatgacgctctgactgcgctcctcgtccatggtgaaggcggtacgctcccagtcgcaggaagcaccgaggcgcttgagctgctcgaggatgatgcccccgtgctcgcgcgtccagtcccaagcgtgctcgaggaaggcttcgcgcgtgaggtcgtgcttctggatgccctgagcagccagacggccgacgaccttcgcttcggtagcgatagaggcgtggtcggtaccaggtacccagcaggcgttgaagccacgctgacgcgcacggcgcacgaggatatcctggatactattattgagcatgtgccccatgtgcagcacacccgtgacgttgggaggagggatgacgacggtataggcagggcgatgatcgggggtcgagtggaagagcttgtgctgcatccagtactcataccatctattctccacagcctcggggctgtacttggttgctaactccataatagtggacttcgtaatgtatctatatagtttattctgttgactgctttgcaccctaagacggacaccctctcgcgaagggagccacctatgggagctacaaatttacatcaatcagacggattgcgggtgcacgaagcctctgccataccccttcggggcgcagcacagtgcgtagagagcgagacttcgctcggggggatgtgtagggggaagagggggggattagatgctaaagtaaagacagccgatgccaaaaaggcccatgaataaaaagctaactcctgcgacaccgaggaggatgataccacgctccaggccacgacgatccgcaaggcgtacgccccacgtcaaagcgatgagattcggaacgaagaaggagagaataaacagccaacgaggatgtgaagcaatgacatagcataccgcctggatcccaataaataggagcagcgaaacgatagacagccaaaggaccagagctcggtgacggtacctccccacgagtgggtgattcattggtagggtgcagttgatgataggttatgattcacgtgtaatttggtaatacaaatatataaagatttcgatatacacaggcaaggcactccacccgacttcttcctgcgtcttttttcctgatataaaatatcttagcgccccgccctatctacagcaagagcacggcgagagccgacaccaagctaaggtacgcagtaccctcatcctcccatagtagcatctcatcccgccacagcgatttgtctcatcctgcataaggaaaagctgcatttccgtggagaaaagcgcagctccccgtagtggtatttctctatccacgcacgtagtcttaatgaccaggtatgtaaatccaaaggtccacgcacgtagattttagagccacgtacgtagacggcgcttatctaccactggtccgcaactattattcgcacacttcggcaggcattccactactgctccccgcttttctctccaagagatgcgaggccccttcactgcaaggcgaacgaagggacagctacgcacgctgacacctatacaagacgaagggaatgaggctgaggaacaaataagtatctttgtgatgcgaagtgcaagacgctcaccgctgatggtgcgcctccgccttctacccccaaggaagctatagctacggcaatgaaacaactctacacactcacctctctctgtctcctctttgtgtgcctcatgggctctaccctctccagctgtacgggccgtagtggtagcgcacagagcgccgactcgaccctcgcagcaggcacacaggatcccaatggccccttagactgggactccatcgtggtctccacgacctacttcgacaatcaggcagcacgcaagggatcgtccgtagaggtagagctcttcttccgctacccgaagaatgactccgcgctcctcaaggctgtcagcagtgtattcttcggcgaagcctatgcaaactggagtcccaaggaagccacagagcgctatctgcgtgaggtgcgtagcgaatacctcttcggcgctgactccctcggcttctccgctaaggagctggaggatatgaagagcgaaatgaccatcttcaaccacatcacctatcacgacgaccacatcatcacgatgcagaaggatgtgtacacctactctgcaggggctgcccatggtctgcctggcacggggaactataccttcgaccgcaagagcaaggacgtcatcagcgaaggagacctcttcatcgacggctatggccccgagctgaataagatccttcagcgtgcgctcatcaaggagttcggccgcaagagcgctcaggagatggagagcaaggatggtatctacgctgccgacctgacgagcaatgataacttccgcctcgatgacaagggcatgacctatacgtacaatccctacgagatcgcccccttcgccatcgggatcatcgagatcttcatcccctacgaggaggtacgtcagctcctccgcccacagagcatcatcttcaactatatccagccctaagaccgcatggccgctatcgacatcatcacccgctacttcccccagctcacccccgagcagatcgagcacttcacccagctcgataccctctaccgtgactggaatgcaaagatcaacgtcatctctcgcaaggatatcgatgcgctctatgagcaccatgtactccactcgctcggcatcgcccagatgatccgcttcaagcctggcacgcacatcctcgacttcggtacgggcggaggcttcccaggcatccccttggcgatcctcttccccgagtgcgagttcctgctggtcgacagcatcgggaagaaggtcaaggtcgcagcagccgtcgccgaagccctcgctctgaagaacgtgcgcacgctacacgggcgtggtgaggacgtgaaggagcagtttgacttcgtcgtcagccgtgccgtcatgcgcctcgatgagctggtcggcttcacccgcaagctcgtccatcacgagcagcgcaatggcatgcccaacggactcatctgcctcaagggcggtgagctacaggcggagatccgcccctacaagcgcatcgtcgaggtgcaggacctctaccccaccttctcggaagagtacttcaagacgaagaaggtcgtctaccttcccctctaagcgacctcaccagaccatatacagcgcacccctactaccgactggtagcaggggcgcgctgtatatataggtagctctgcttagccctcagtctcaggcacagagggctcttcctccgtcgtctcctcggggatctcggggagaggctcccccttgatagccacgtagatcgtgcaggtacctgggaagatactatggtagaaggcctcgctgaagccggcttcctgcaggatagctaccatcttctcacgctggggcatcgcagcgatggacttcggcaggtacgtgtaggcatccttatcgtccgagaagaagcgcccgatgagcgggatgatctgccctgcgtagagcttgtagcccacacgaaggaggggattcgtcggctcggagagctcggcgatgaccagcacacccgaggggcggatgatacgatgcagctcacgtgccgccgcggggatgtcggggaagttgcggataccgaaggagatcgtcgccgcatcaaaggtattctcctcgaagctcgtggcggtgcagtcctgacggtcgaagacgatgcggtcgctcaggcccagctgatggaccttctccgcaccgatgcgcatcatctcctccgagatatctatgcccgtgaccttcttgacggagggcatcgtctgcacgagtgagatagcgacatcacccgtacccgtagcgacatccagcacgtgcttcggagcatagggagcgaggaagctcagagccttgcggcgccaagagcggtccagcccgagcgagatgacgaggttcaggcggtcgtactgtggagcaatgcggttgaacatccggcggacctggtccaccttcgggtcggcactgtccttatagggggtaatcattgtggtagagatatgggaaggatgtgataatgatggtgatcacttatgagagaagtagatcgagtgggcatcggagatacgccctgaggcggggcgcacggcagcgatataaagcccagggacaagccccgtgacggacaccgtggcacggccacccgtctgcgtgagcttctggtgcatatggagctgaccggtgaggtcatagatacgcacttcgcagggcgtgcggcgtagctcttcgccctcgaggtgcagagccccgccgtggtagtaacccgtgagaccttgtggtaggtcgctcttcgcctcaggattgaccagcgtcgtcgtctcgatgaggaggtcgatccagtacgccccaccagggagctcggtgctgcgacgccagccatctgtccagtggtgcgtccacgcagcccacccacgtaggcggtcagcaggcccgtcataggccaggagcggcagacgcagctcacggctgtcactcgtcgtacaggagaggaggtagcgcccttcgctgaggctgagcttcaagccatcgggcgcagggaagaagagctcgatactatcggagcggagcgtacgtgagccacgctgcgctgccccgaaggcatcatagcgtgcatacgtgccgagggtcgaggaggcgaagtccacgaccttaccgccgagggcatagtcatcggtgaagggctggagcgctacacgcagctgtggaaggtctgcggaggtgagctgatcattgctcttgaagacgacgtaggccccgaggatcgtagcccccgatatctggggaaggcgtagctcattgccgatggcgtcgacacccgtacggggcgtgtgcgtcacgttgggcttgacgacttcggctgaggtcgctacgggatcggggtagatagcgctcaggcgctgcacgaccttcggcgcaatagggtcgtagccatcacaggtcttacggcccgagttcgtggggtcgagccacggacggagcgaacggatcgtacctgccccaggggtattggacacccacgagcgcttgagcgcccagtaacggtcgtcataggggctttcacaagtggaggctccccccgtcaaggcgccgacgatgaggccatccttatcgaagagtgccgagcccgaagagcccgcagccgttgcaccgacagcccaagcattcacctcccagtgcacgtcgctccacgagatgaagcgcacggagccgtgcttatcctcataggagaggtcgtagtcgttggtacgcagctcggtgtcacgggtgaggttgtagcgcttggttgagcccccaggatggtggataccgacgaagggtccttggggcgactcattgatattccacccagcgaagtagggctgataggccgctgggatcgggccgagcgtgccgttagctctgcgaggaagccccttgatacgcagcaggcacatatccgtattctcattgtagccgacgaggttggctccgctcaagctctgctcctccgtgggtcgcacgttgccctcacgcagggggctttggaagctgaagaagaagacggtcgtcgaggcattgcgattcacagcaccgagatcgccgaggagcttaaagagattattgaggcagtgtgccgaggtcaagacgtaaggcgtgccgtcggagcgggtgttgttgatgagcgaacccgtgctggcgctggttccaccgacgatgagaaggagcgtgctacggctctgcttccacgcatcgggataggcgatagcgttgggcgcacagctcagcgaggcgagcgaagcgcgtgggtggtcgtagaaaggctccccaggttgggcaaaattctccgcgcggccagcactgcggaagtcgcggaagccgtagaagagcgcatcaagtcggaaggggagcttcagctgatcagcacgcgtcccctcgggatattcgtattcgagaaccagcgtctcggcatcgatgggagcgatctgtaggaggctatccgtctcgttgttctgctcagtgaacgcccccttagcaggacgccccttagccgtcacgaagagcgcaccgccacggggcagggcgtagcgtgagaggcgcagaccgatgttctttgcctgaggggcttggacctcagcacgccacacatagttccccgctccatcttggtacatacgtcccagcgcctcggtagcctctgccacggggcgctcgacagcgaaggtataggtgcggaagcccttatccccagccgtagccgagcggagctcctcagcggagggtgctgccacacgcaggacgtttgttgccgagcgcatcatctgcccggagcccagtgctcccacgacgggcgagaggggcatctgctcagagcgcggagtgcgtgccgtgcgatactgtccccacagtgcctcgggaaggagggcaaggagcatcaagaggggaaggcgtagagagcggagaagagacatagctacagggagatgtagggtgtgtgatctgtggcggactactcgatatgggtgaagcccagctgctctaagaggggcttctcctcggggtaagcacctacgacggtgtaggcagaagcttcgcgggggaagcggtaggcacgacgcacctgctcgaagtcctcgggagcggacttcagcgtctgggtcgtggccttgaggtcgcaagtatggagctgggcacgcaggatgcgctcttcctcggggaaggcgctgaggtcgatgcgtggggcatcgggcgtgtagaggacgccttcgtcccacagtccttcgggcagaggcaggtcgagggcacgacatacggcttcgagcgccatctgcgatccacgccacttgccgtcggccgtccagccagcgatatgtggtgtggcgatgaagctgcgctcgaggagggtcttattgatgacgggctcaccctcccagcagtcgatgatgaggtcggagatctgacgaagctccagccccttcagcagcgcgacactcggggagacggggccacgacaggcattgatgaggagcggacgacgcgcacagccctggaggaaggcctcatcgaccatcccctcggtggcgtactgccccgagcgcgtcagcggtacgtgaagtgtgatgatatcgctctcgcgctggatcgtctcgagcgagacgaagccctctgcgccctcacgctcagcacgaggtgggtcacagagcagcggacggaggccgagagcgccgacgcgcttggccaagcgtcccccgacattccctaccccgacgataccgatagtcttcccctccagcgaggcgcctcgctccagcgaccagcgcacgagcgatgagaggacatactgcacgacgcccccggcattgcaccctggagcactctcccagcggatacccgcggcagcgcagtagtcggtatcgatatgatcaaagcccgcggtagccgtggcgacgatctcgacaccgctcccctcgaggagctcgcggccggcgtgcaccacactgcgaatgagtagggcacggacgccacggatcgtctcgggcgtgaagtcacggttgggcaggcggcgcacgtcagcgacttgctccaccagcccctccagatatggtagggaggagtccagcacaaatagtggcttatccatcacgatcttcttatcaaaaagctatcccgaccgccgcccatacgaggcagtggggtcaggatagcaaggtgtgttcttagcttgggactcgcgtcgagcctcaagctgaggccacagatttagtttgcattcacctcgacggcgccgtcttcgggcagctcgatcttgccgtactcctgctcgaagccagccaggtgctgctccagaaggcggaccagacgcttagcgttgtcgggagtgaggatctgacggctgtggacgcgggctgactgctgaccagggagcagacggacgaagtccaggatgaattcgctctgcgagtgcaggactactgcgaggttagcgtactgaccctgaccgacttcttcggggagctcgatgttgaactgaggagtttcctgttctgccattgtttctacttgtctatataatgtacgaaggggagtagatccgcttcgtaggcgggctacaccatggtcaaagatagtgaaaacgccccgaatgcgtgcatagccaccgagggagggtggatgggaggaaagccaggggtaaatgggacctcgccgagggggtgagttcgagaggcggagaggctacgccagtgcagttgctcgagaaagcggatgagaggcgtggggagggcgtaatcgcccaattcgctccggttcacccattggtacttggtgctccctacggcgtcggactcgagttcggcggtgtagatggtaatgtgaagtatttggtgggagagccggtgctcaaggctgaaagttgtaggcgcaaggcgccccccgagtaggagagctcgtcctctacccaatgggctaccgcttcgggtatttgggggctgtcactctcaaacaaagggaattgatacagtcctcgccagatgtcgtttcgtcctcgcttttcttgtaagacttgctgatggtaggtgctatagatgtagctgaagtagcgatctctaagggttagctcccccccctttatggggaggagacgagcgagagggagctccgctacacggcaccacgatgaggcagggcaggcggagcattggggcgattgaggggtgcagaccaaggcgcctagctctataagggcttgccccaattggcttgggggaagttgggtggcgagtagttcctccaccgcttgggtgcagagtcgcttcccgcccagggtgtctctatggggagttcgcttgccagtagccggctgatcacgcgcagtacattgccatccacggccgggtaagggagatcaaaggcaaacgaggcaatggctccggcggtgtagtcgcccccccccgggtagagcacgtatcgaggcaaaatctttggggaatatcccctgatgcttcgtggctataacttgtgtgctgcacgatggaggttgtgcgctcggctgtagtagccaagtccctgccataggctgagtacctgatcttcggaggcttgtgccaggtcggtaacggaggggaaggcttccacaaagcgaagaaagtagtcaagcccttggtttacgcgcgtttgtgcagtatgacctccgagagccaaatgtggtaggggttgcgagtggtgcgccatgggagctctcgggcattctcttcgaaccaatcgacgagggctcgggatagcggttgggggtgggtaaggagggtttcgctcctttcgccgcaaaggtacaatccgtggggcgagggggagcggtctcttacttcttttgtgaaaccttaaaatttcgctgccccgaagaacgcctttccctaatgtatgatgtaaggcatgataaacatgataatgggaatgatgaatacaaacaacagtgtgctcgttgtaacaacattggtggcgtattgagtgtcgccatgtgaagaggctgccaagaccggaaggatggccaaggccggagttgccgactggacaatcaatgtctctttcagacctacgctgagcccatgccctaaatgccctcctaacagcaggagaccgatgatggccagaggagagagaataaatctcccaagaagagctactatggtgtcacggtcgaagcggatcgatgacaactttgaattgaatagcatgatccctatataaagcaaggccaagggggtgacaatgttgcccacgtaggtgaaggtctggtctataaaggatggaatagggatgccgactattaggaagaggattgctacgaagaacccaatcaatggagcagggagaatctgctttatgttgaggtgctgcgttttgctatttgaggtctttgtagggtcatcggcctttatgaagaaaatgcctacaacccaagtcgacaccgtattggtaacatagtaaacaagaaaatagggcatgctattctctccaaagagggcaatgttgagaggcaagccgatgaatattgtatttgcattggcaatggtattgataaatgtaccccgacgtccggggcgcactttcaatacctttgccaatacaatagccacgatgtatgctattgccacccctcccattgggtatatcagactgctacctagagatagcaattcgcttcgtgaaagatatttcaatacggaggagaatatggaagcgggtagggctatatctgtgataagacgggagatgtttttagggaactcttctccaaaccatctcctttgctgcagcacgtaccccaaggcgataatcagaatgattaccagtacactttgtatactttggaataacatactcatggcctttttgaatttgtatcctattcgtactttggataccacttcgcagccttaatagctttgcgagcatcttctatcttttcacgggtaagcccttgctttatggcggactctgccaccactatggcgatgtgctcagagaattctgtcagcttttcgacgggggggagtacggccgcacccggcttagaagtgtcaacaattccgccaagtgcgtgggctgcctcagagagcagggtttgggttaccaatttcgcagtggaagcgatgatgccgagcccaagccccggatacatcaaagcattgttggcctgcccgatgttgtaggtaatgccgttgtagacaaccggagcgcttgggacgcctgttgcaatgagcgcacgaccatctgtccagtggataagatcctttgcagtggcttctgctagctctgttgggttagatagtgggaatattatcggtcgtttcactaccgaagccatttccttgacaacttcctcactgaacatccccggcgtggtagaggtgccgatcagcacgcttgggtgcacggccttcacggcatgatagaggtctgtgagtgatgaggcattgtcaaactcggcacgttggcgcacgaaatgcttctgcccttctgttagatcttcggtgtcttcaaacagaagtccttgcttgtcgaccaggtagatacgtgctcgggcttcggagtctgatagtccctgctgcttgaattcctctgaaatctgggtcgcaataccaactcctgccgtaccagcaccaaagaccatcactcgctggtcggtgaacttttctttagaaatttctaatgcaccaaggatacctgccaatgctacaatgcccgttccttggacgtcatcgttgaatgtggtaatgcggttctggtatttctctagaatggtggcggcattagacctgccgaagtcttcccaatgcaaatataggcgtgggaataggcgctcggctgtagatacgaacttgtctacgaagtcataatacgcctctccacgtacacgaggatgtctattgcccagatagagaggatcttcaattagttgtttgttattggtcccgacatccagcaccaagggtagcacttgattcggattgataccagcagcagccgtatagaccataagtttgccaatggagatggcgactccgccaattccccagtctcctatacctaaaatctcttcggcatcggtgacgacaatcagacgaatatcgcgatcaccggctgcgttcttcaaagcctcttctatctcatccgggtggtcaatggagagaaaagcggcgtcttgaggtttcataaacaactcgtcgtattgccgaattgcatccgcaaccgtgggatcatagacgataggcatgaactcctctacgtgttgtgacatcaaagcatagaacaaggttcggttcgtattgaagagcgtcatcagataaactcgcttttccaaatcgctaactttcttctgaaactcttggtaggtctgtgctacctgctgttccaaggtctggacgacagttggtagaactcccacgagcttgagcgcctttctttcctccagcgtaaacgcagtccccttattgataaaggggttgtttataatttcctgtgctgtcttcatacttgttgttatttattggttcgataatcttgaagccgatttcgttgcttcatgctcggaaggtagtaatttttctggaattgccaattgctccacacctcgcgcgtcagccaagagaagtccaccctcccaccctccgatccagagcgggctctcgaggagggcaaaatgaagcagtactggtcgccagagtgagcagtactggtcgccagagtgagcagtactggtcgccagagtgagcagtactggttactatcatcgaccagtactggttcgatcagtgaccagtactggttcgcaaaccaccctgcggagcttcctcccttccccctataatagaaggtgctgtgaggcgcatcagcagacgggccgaacccactaaaaacagaaagcgtgtgacctgagagccgaagctttcaaagtcacacgcctaaagtaggccctcggtgatcacaccttaccacactacgaacaccaaacgcaatcttcccgtaacccagaaggtatgattcctaagagacctgatggccgtctcacgacgcccatgacaatatttctatgtgcagggagagtccccctaagggtgtcctcccgtttttagcgggacaaaattaaaaattttatttgattaccaactatatcgttccatagatatgctgaatggcagtgctcagctcgtcatagagggcggcgagttctgtctcaccactccttataagaaacgcttgatgtcggcgaatcgtctccctgtcaccgcgctgtgcgggccccgtctgcgcctctacggcaggcagatgatgcagcttctcattcatctcatccagcagaggaaggatggcttttggcgggagtccctgcgatgtgagcaggctctcagccctgccgatgaggtagttggagaagttgcacgcgacgacggcggcgatatgtagcacctgacgctgctcgctcgtagcccaggcaacgacgtcgctcagctcacggccaagagattccacagccgtcttcgcttcgggggtcgtcccctcgagatagaggggtaccttgcggaagtccagctcgcgcccttcggagaaggtctgcagcggatagagcaccgcagcgtcccggtgacagtgcgagagcgcctccagcggcgtagctcccgagacatgcacccacagggcatcacgacccacctcgtgcgcagagaggctctctgcgacctcggcgatagccgtgtcgggtacggcgaagaggtagcagtctgccgtgcgatcaagttcatccacacggctcgccacctgcacatcgcccccgaggctctcggcaagccgtcgagccgaatgccctccagggctatagatctgtacgatcctgcgctcaggggcatagggcttcagcgcacgcgataggtgcgtcgccaggcgccctgcccccaggaggacaatacgctctgccgtcattaggcttcttcggtcggctcttcggccatctgatagcgaccgatatggatcttctcccacttcagcgtctccgtggggcggggcgcagcttcgcccgccttatgcccgatggcgaggatacaaagcacctcgagctgataggggatatcgaggacattgcgcacgtattcggcagactcctgcccagcgcccgtatagcatccgtaggcatctgcccagcacgaaccgaggccaagcgcctctgcctgtagctggatatagcccgctgccagcgaagcatcagcgatccagcgctcacactccatcggcgagcccagcacgacgatgcctaagggcacctgctggaggaagagcgctccgctctcgcgcatacggctgaggcggtcaagcgtctcatgatcttcgacgaggatgaactgcgtcgtgtgcttattcttggacgaaggcgcacgcagccctgcctcgaggaggacctgcacttcgtcgcccgtcagcggggtgtcgacgaacttacggatggagcgacgcgtatatatagcggggaggagggcgggctcattgctctcggcgaggagttcctctccgaggctcttgatttcgctcaagagatgctcgccttcacggagcaaggattggtctttggtcatatctataatgtatttacagcgtaaaggtacgaagacttagctcagcgagcctcgtcgcttaccccgacaagccttcctccaagagctcatcgaagcgtgagctcttgaggtatccacgcttgaccttattataggctatttcgtctaagaagcctcgctcgacaagccccttcaagtccgacttagctgtcgctaatgtgaccccgaagcgctgtacgacttctccacccgtcagcgatagggcatcgctatcttggtaaagtctgaggatatgcatctggcgctcattgagtcctccgatacgcaggagaggggttaggctctcctgctccttgagcttctgctcggcatagctcttgaagctctcgatagagagacgtagcaccttgagatgatattgcacgaagtaccccagatccagatcatccgtctctaccttgaggtaagcctcttcatactgactcttccccttatagataacctgcgagatagatagatactccaagagcgaatagcctgagcggagcatataccaaaagaagagcgcacgtgccgtacgaccattaccatccacaaaggggtgcatatagccgatgaggaaatgaataataatccctctcagaatcgggtgaatgaaagtcggctgctcccgatcattacagagcgagaggaagaactgcatgaagtctgagagttcggaggcaggaggaggcgtgtgtaccacctctttcgttagttcgttcgctacatagacatcatcctcttctgtacggaaccgtccttcgtccgcagagtgctccagcgtaccccgtaccatcgagcgatgaatctgcaggagaagctcctcggtcatctcagcattatgctgctcctgcaggagcgccatcgtgcggtagttattgaggatcatccgctgagagcgatctcggggtgtgatgttcttacgtagcatctccttagccaccctacgagtcgtagctgccccctcgatctgactggagcgtatagcctcctccatcagagcgctcatcagatagcgacgtttgtgcgctggaggaattagctccgtgacaaaacggtctgcctgaagcaattgatccaactcatacagttgcccctgcatctgaggtgtcacaaagagtcgcagtccatagcgaggataaatgctgatgcccgctgctctacgatgcttcttcagatatccccacaaaaggcgcggcgtcaatggcagctctatctctttatacttatacttgatctctgtccaataagcataacggtcattacactcacttagaaacccctccagctgaatatccgaagggtggctgagtatatattcttgctcctctgcagtaagggtaggaggagtctctatcggtgcactcatatctaatcattatccaatacacaaatgtagcaattctctttaatcatataaaattaaatagaattacttctcttggcactatccccactaattgaataaatgcggcataaagcaaagcgaggcagcgaccagctatccgccggtcaccgcctcaactaacagcatatagagcttatgataatgagcaaaataaaggcatcttcactatagtgaagatgccttacaatatgcgagagggtaatgcggagcaaaagagcagggagcaattattttttaatgatttgtaaattcaaacaaccacattgacaagaagctcgccaaaaactgaacaaaaaactggacaaaagactgaatccaactacgcctccaaaatggagggctatcagtctttctggcagtaggagaagtcctcgactgattacctatcgaatcaggaacatctcgagtagtattctccaagaacacaggtacaagccatacgcttcttggagacctagaagagttacataaaatcacgcaacaaccactagggagatgggtgactatctcgtttggttgtctaaaaagctgctgtaatacaatctgctgacaaccatcggatactccccgagaccttatcctaaagaaaaagaactcctctagttcaaggtctcccaaagacatcgtagctatatccaagtagaaatcctgggtagctatgggggtattatattcctctcccgaaaaaagggagtagatagagctgttcccaagggaacaagccttaatatctaataatttcataaacaaattatctaagtccctgctcttcctttccacatcatttcaatagaaccaaaggctcactccaattggtgcacctccagccacctatcgcactaggtgagggcaaagataaggaaagtttgtgatcaaacaagtaggggcaagcaataaaggcggtgaccagctggatagccagtcaccgcctcgcgatgggtgagaagaaaagatatcgacagcagaagcgagtacgcacattcagaaaaaccacctaactcatctcttacgtacatactacactaactatactaaagcccattttcagaactccagaaaggaggtgttccagccgcaccttccggtacggctaccttgttacgacttagccccagtca

SEQ ID NO: 73 - DNA, 202092 bp, Porphyromonas bobii
  source 1..202092: mol_type = genomic DNA
tgactggggctaagtcgtaacaaggtagccgtaccggaaggtgcggctggaacacctcctttctggagttctgaaaatgggctttagtatagttagtgtagtatgtacgtaagagatgagttaggtgatttttctgaatgtgcgtactcgcttctgctgtcgatatcttttcttctcaccttattatagtcctaaagacagtcctatagctcagttggttagagcgctacactgataatgtagaggtcggcagttcaaatctgcctgggactactttaagtgacttacctgggggattagctcagctggctagagcacctgccttgcacgcagggggtcaacggttcgaatccgttattctccacttttttcaagacgatcggcttgcctcatatgaggtgagccgatcttttttgtatccccctgtctactcattactccctcttcctatatatcctctttctcctccacgctgtaaaggaggtgtatacctaattcgtttggagattcgttactacttctctatctttgcctgtatgaataacaccccgtaatacttaagatactatggactttaaagaccagttaaagcagctcgcagagcgtattcagacgctcaaagatcagatccataccgaggaagccactaagacttcactgattcttccctttatacaggcattagggtacgatgtcttcaatcccatggaggttatccccgagatggtttgtgatatcggtactaagaaaggggagaagatagactactgtattatgaaggatagtgagcctatcattctgatagagtgtaagcactgggggcaagatctgaatcttcatgacaaccagcttttgcgatattttcatgtctctaaggctaagtttggagtcttaacaaatggaattatctaccgcttctatacggatctaatctcccctaataaaatggatgaggtcccattcttagaatgtaacctgttggatcttaaggagggggttgtagatgaactcaagaagttcaataaatcgtatttcgatgttgagcagatcatgagtacagcgagtgagctgaaatatctgcgagagcttcgttccattattgctgaagagttcaaatctccctctcctgactttgtgaaactactgggtaagcaagtgtatccaggcgccttcactgcaaaggtctccgagcagttctctctacttatcaagcgtgccatctcttcgcatatatcagagattattgcaggaagacttaaggcagcggtacaggcagaagagcaagaagcaagtgcggtgagtgagaatgagcccaatgagtcgcaggatagtgcagtagaagagtctgcagagtctaagattgtgaccacagaggaagagctggaggcatatcagatggtgcgggctattcttgctaaggagatagatccacgtcgagtatactacagagatactcagagctatttcaccatcattattgatgataataatcgcaagaatgtatgtcgtctactcttggactcccctaagaatcagcgtttgatactgattgatccacagacgaaagagcaaacgacctacaagctggagaatatagcagacctatatcactatatggataagcttatagagatcgctaagcagtatatgtagagatcgttagggtaaatagctctccttctaaaagagggagttattttctgctgaggttgaggctatgatctatagatgacatagatcatagcctcagctattattatggggtggaataatggacttagtcttttgcaaggagtccagaccatatcccattattgtgatagctctacttctgactggggatagattgctttatcattcgttttgaggcatatctacaggggagtttttgctacctttgcaccgggcgtgcctgcccgtaaccattataatagaagagatagggtaatctgtagatgaatttagttatagtagagtctccgaagaaggccgagctgatctctggctttctcaaaaaacatcaactgaacgactataaggtcatggccagtgcgggccatgtgcgtgacctcaagcagcattccttcagcgtgaatgtagaggatcacttccgccccgagtacgtcatcaccgaggacaagaagagcctggtgcgcgaactcaaagctgcagcaaagaaagctgacctcgtctacctcgcttccgatgaagaccgcgaaggagaagccatcgcttggcacctgagcgaagcccttgagctcaagcccgagaagacccgccgtatcgtcttccacgagatcaccgccgaagccttcctccacgccctggagtacccacgtgaggtgaacatgaatcttgtcgatgcgcagcaggcacgccgcgtcctcgaccgtattgtgggcttcgagctctctcccgtactgtggaagcgcatccgtccctcgctctcagcagggcgtgtgcagagcgtcgctgtccgactcatcgtcgaccgtgagcgtgagatcacagccttcgtaccccaatcttcttaccgcctacaggcgaccttcgtcctcccctcgggtgagcgtctcttgacagagctcaatcatcgcttcgctaccgaagccgaggctgaggcccttatgacccgctgtgctacggctgacttctctatcggtgcgatcacgcgccgagctgctcgacgctcgccagctgctcccttcaccacatctacgctgcagcaggaggccgcacacaagctcggctactccgtctcgcagacgatgcgccttgcgcagtccctctacgaatcggggcatatcacctatatgcgtaccgactcggtcaacctctcttcgcaagccctcagcgctatcgctcgtcagatcgagaagcaccccgggaaggaataccaccagccccgccgcttccagaccaagagcaagggcgcacaggaggctcacgaagctattcgccccacctatatcgaccgcgagcgtgtcggtggtacgcctcaggagcagcgtctctatgacttgatccgcaagcgtaccctcgcctcgcagatggctgacgcagagatcgagcgcacgaccgtatcgatccctgtggctggtacggactatgccttcaccgcacagggggaagtgatcaccttccgaggcttcctcgatgtctatatggagtcgacgggtgaggaaggcaatgcagaggtgacgaagctcctccccgcagtcaaggagcgcgaagctctttcgctcgaagccctcacgggggaagagcgcttcacacagcgccctgcccgctacaccgaggcttcgatggtaagcaagatggaagagctcggcatcggccgtccttcgacctatgctcccacgatccagacgattcagaatcgaggctatgtagagcgtgctgaccgcgaaggccagtgccgcaactataccgtactgaccctcaaggatggcgccgtcaagcgtgctgtcaagagcgaagtctacggcgccgacaaggggaagctcctgcctaccgacgtgggtatcgtcgtcaatgacttcctcgtcgaccagttccccaatatcgtcgactacaacttcacggcacgcgtcgaggaagagttcgatacgatcgccgaagggaagaccgcttggtcaggtgctataggtgatttttaccagcgcttccaccccgaggtagagcgtgccacgcacgagcgtcctgctcagcgtgtcggtcagcgcatcctcggtgtacagccctcgacggggctgcaggtatcggtcagcatcggccgctacggccccatggcacagctgggtacggcagaggatgccgagaagccccgctttgcttcgctgcagaaggggcagtcgcttgagacgattaccctcgaagaagccctttcgctctttgacctgccgaagaatatcggtgagtacgagggtgaggtgatgacggtcgcagtgggtcgcttcggcccctatgtccgccacgcagggaagttctacagcctgcctaaggacaccgatcccctctcctgcaccgcagagcaagctatcgagatcatccgcgagaagcgtgagagtgaggagaagagtctcctgaagtccttcgccgaagatgctgatctctcgatccgtaccggtcgcttcggtccgtacctcaagtacaagaccgacaactacaagctccccaaggatgtcgaccccacgtcaatgagctacgatgactgcatgaagctcatcgctgagacgcctgcgaagacggctcgtaagggcgcagctcgcaagtcctctccccgcacaaagaagtcgaagagctaagctgtagatgcgctacttcatctctctgagctacgacggcacgaactacagcggctggcagacccagcccgatgctccgaccgtccaagagactatcgagaaggcgctgacactcgtctcgcgctctcccgagcctatcgctatcgtcggtgctggtcgcacggacgctggtgtccatgctcgtggtatggtcgctcacgttgatctgccgatggatctcgaggcagcacgtgagctgatcttccgcactgaccgctacctccctcacgacatcgccctgcatagcatccgtcccgtgacggacgaggcacatgcacgcttcagcgctacctcccgtacgtaccgctactatgtgacgctgcgcaaggatcccttccaagagtcacgcatgctacgcctgcacttcccgctggactttgagcggatgaatgtagctgctgccgagctcctgcacttcacggacttcacgagcttcagcaagctccataccgacgtcaagacgaataactgccgtgtgaccgaggcttactggcgcccaggcgcggagcctggtcagtggatcttcacgatcacggccgaccgcttcctgcgcaatatggtacgtgccgtcgtcgggacgctcttccaagtcggtaagggacgcctgtctgtcgaggacttcgctgccgtcgtcgaggccaaggatcgtggtcgtgctggctcgtcagctccaggacacgccctctatcttgaggctgtcggctatcccgaagagctgtatctggactaagctcctcccgcacatctctaataaatagcgcaggctcctccgccactatgggcggaggagcctgcgctatttatatataaggggaaggggtatttactgcccgacaccccaagccgcgaggctatcgcatagggcgggggcattgcgacgtgtgacccagagcgtgcgcacagagtcggtcagcgggagcttgcagtcgagtgcagggtagaggcgtgtgaagcgctccgcctcacgggaggtgcagacggtatagcggatcttccctgaggcgaccaacttcgccagctcctcggcgctgtgaagcgtgtcaagctggatacggaggctgtcgcctgtctgcttgacgaaatacttttggatgtaggtggtgggagtgcccttgggtaggggcagtgcgtggcccgcgagcgcagagagctggctgatgtagcgtgtgctgtcagcatggcgctggacgaggtagagggatgctgcccgcttctcggcgaagtgtcggtactcccggttatctatcgctgcatcgtagatgctggagtagacgaagagatctacctttccagtcgacagttgtccgagtggcttgaactgcaaatctatagaatctggggggacgatctcgacacgtagcctgctcttttgacttagatctcttgcgagctcttggatagcagcgtcatagatctcgctttgatcatcactgagaaagtcgttgccagcgatgaggcggagtgtcccctcctggcgtatcacggggtagtcacgctcgacacttctcatatcccttgctctgcgccgctccgcccgtctatggcgagagtaggagtggcactcggcgccgaggacgaggacaaagatcaggaagagccaatcggaaagggtcttagggaaaaacttcttgctcatatcggagcttcgtcatcgtatcggggataatgcccagtggacgctatgcttatggcgtgtagacggctggcataaaacctatcgtccgacaccccaagcgatgaggctatcgcgaagtgcgggcgaattgcggcgcatgagccaagctgtgcgtacggagtagctcagcgggagactgcagtccagtgcagggaagagacgtgcaaagcgctccgcttcctcagaggtgcagacggtatagttgatcttccccgaggcgacctgcatagcgagctgctcggcagcgtagagcgtgtcgacctggatgcttaggctgtcgccgatctcttcgccgagatgctcgatgaagagcgagaggggagaggccttcggcagggtgatggagtgcccagcgagctctacctgacggctgatgtgatgcgcgctgtctgcacggcgctgcacgaggtagataggtccagaggtcttctccgcgaagagcatataacgggtagtatctactgccgaggtatgcgtgatgggatgggcaacgaggtctgccgtgccggtgctgaggtggcgaagggcttcgtcccagcggttctccagcacgacctcgacacgtagcccgctcttcttctccagctgcttggcgagctcgtagatagcgcctgagagctgtccgccctgcacttctccaccactgccgtagcctgcgaggaggcgaagcgtgccctccttgcgtatctcggggtagtcgcgctcgatgaatgggagcgaggccgcctctttgcttgtcttgacctgacggcgcaggtagaggagcatagcgatggcgaggaggagcaggaaggcatatacccagaggcgggtattcgtgcggagcttagccataggggagggttagttgttgaggtcgacgacgacaccagcggagaggtgcatcggattgtaggggtacttgtacatcgagaggcgctcgttggtcatgaaggcctcacccacattgtacatctggaggaagaagcgtgcgcgcttcaggcggaagttcgcataggcgatgagtagcggagcctgtccgccgacattgccttccgtctggagggcgaactgctggtcggtgggcatatagtagggcgcgtgataggcggagtgccaatagcccttgacgccgaggtcgacacgtaggaccttcgctaagaggaagcgcagatacacatcagctgctgccgtgagcgaaggtagaggtagcacggagggcgcagaggactgctggtaggcggcctcgagatcccagttgatcgggccgaaggagccagcctgtcgagcacgcagagccaggacctggatgaggtcggagtgctgctgtgtctcacccttgctatcgaagtagatgtagttctgcaggcttgccgtacgtgcttcgaagctcgtcccccaggaggagaggtgcacgcggccaccgagctcagcacggcgggtgaagctcagcgacttgtcccaccagccgtaggtgccgtggtgatgtgcagcgaagtaagaggggcgggcattgtcgatataggcatcggcctcgagggcaaagcgcttctggaagaggctgaaggcggtgcggatatccccctcgagcttgaaggcgccaaggtccgagccgaggacacccagctccccacgggcggagaagttcagccctgtgccttcgcgacgctcgatgagtccaccgatgaaggtcgagctaagtgccgtgcgggtgtagcgctctgtggcgaggtcggggagcgatgcccagcggttctcctgacggaggtaggctgagagaccgaacttcacccaggggcggaagccctccatcagtgagagggcgacggtattctgcagggtgacgagctgtgcggtatcgttcgggagggtataggtcgtcgtggtgccgtcagagctggtgcgggtatgggtcacggcaggcgtgccgaagaccgtgccccactggtcgctctcggtgtgggagaagaagcgacggctctgcttgttgtagtaggtcgtcagcgagataccgcccacggggacgaagtacgtggagtcgaggctctggagagcctcggagccttcttgaccctctatgggtaggggctgcttgcgcttgacggtacggtaggagccgaggcggtaggactgcgcgaggtaggcgtgaccagagcggatgcggttcgtcagcgcacccgtactgatgagtacagggacgtcgcgcgaactgatcttggtgcggctattcgtgtagcgctcgggattgtagatgtagtcggcgttggtgatcccaccattctcctcctgcttgtagtagtcgttggcgatgtagccgaagagctcgtagcggtcgccacgataggaggtgaagacgcggtagcgagcatccttgctacgcccttgcgtgtagaagccactggcataggtgtagtcgaagctcgctccgacattcagctctttgccgaggttcgccccgaagtctgccgtgatgacgtcctcactctcgttgctcttgaagttcttgtgatagcgcacgtaggtgaagggcgtctttgtgtcgtagtagcacaccgcatcgggcgtgtagagcatgcggtagtagccgtcggcatagaagaagtcgctgacacggcgggggcgatcgaagaagagcttcgcctgccactggctattcgtattccccagataggagaccccgagggagcggaactccggtgagatgtactcgaaggtgtagtgcgtcagcgtgtcgggcatctcgacgcgtacggcacgcgccacatcgggcgtgatcttataggccttgagcttgtcgccacggaccatcttgatctcgtcgggcacctcgacgacctcacgtacctgataggggtcgtaggggcgcacgggctcttgggcaaatagtgtggcggagctgaggccgaggaggccaaggagcaggaggcttcttatcttcattaagtagaatgaggctggggaaatatacggacgatgagggggggaattagcactgctccataccgcagctgcatccccgtgggtcaagctcgatagtcagatgatcgagctggtagcggcgagcgacctggcgcactgactccttgagggcagcgagagcctctgggcttgtggtgcctgagcagtcgtagacgatatgcagggaggcgatatgctgctcgccattgagcgtccagatatgtaggtcgtgcaggtcgagcacacctggcagggcacggacttcttcagcgaaggcctcttggtccacgccttcgggcaccccctgcaggaggatgaggaagttgtcgcgcagggcaaagtagacattgtagaggatccaagcggtgatgccgagggagagtagggggtcgaggatcttgaaggaggggaagaagtacatcacgatactcaccacgagtaccgctacccacccgaggacgtcctccatgaggtgcaggcgcatggagcgctcgttgagtgaagtcccacccatcatacgccacaccgcgaagccattgatcaagaggccgaagaccgcgaggatgagcatagcacccgcacgaggtggatcggtcggcgtgatgaggcgctcgatggactccttgatgacgaagaccgagcccactaagaggatcgtagagatgagcagggagccgaggagcgagaagcgcttgtagccgtagctgaagtggctatcacgccccttcttcgagaggcgctcgaggtaccacgccacaccgagcgagcaggagtcgccgaagtcgtggagcgagtcggagaggatcgctacactacccgtgtagagtccaccgaagagttcgatgatggagaagaagaggttcagcaggaaggcaatgaggatatttccctccgcatgatgatggtggtgatgatggtgatgcccatggccgtgactgtgtccatggctatgggaatgaccgtggtcgtgatcatgactgcagtggtcgtggtcgtgattatgttcgtgagcgcacacgtctccgtgctcatgctcgtgctcgtggggcttcataggagttgtttacgatacgttaattgaagtggcttacttcttgacacaaaagtacaactattccccctctttcccctgcgcacgccctatagaggacgcacttccacgctggcgttatcctcttcctcgtccacattcctcggggataagcctgaggataagtagggagatagggaggatgctgcactgctcttagtgcgaatgtaccgatgcctgcgggtcgatgtcgtggggatctcttggggataacgctggggataaggctgtgggaaaggtgtgtatggggtggagagcgtacacctttcggtggattattcacctaagatgtgtggggaggaagtgcgtcggtgtaggggatgctgaagcatcttgaggaggaaggaaaagcaacctatagtggtcgctggggtgacctatataggtttgctcacggaccagtataggtccacgcatcaaccaatataggttcgcccgatgaccaatattagtttgttgctccacgtagggagaaaagttgcggacgagtagcagaaaagtttgggctacatacgtggctctaatatctacgtacgtggatattaggattgacgtgcttggtctttaagactacgtgcgtggacagaggaagaccactacgtgaaggcgcttttttcttcacgagaacgatgctttcccctccgctgaataagaggaatacttgcgatagggcgaagggcttgtgtatctcttcggagaggtatatcggggagctgggtgcacgatgccttagcactctaaatagaggataggactctatgcaacagtctcaatataggttcgcaccaccctcctgtagaaggggatattttgccctcgcccgagtgtgggtgcgatccccgatacaaagcattaaggtcaggaggcgcagtgtgcagcctcctgacctcagccaagggtagagtatggggaaggctacttcgtgacggtgccttcgaaggcaatcgtcgacttcgtatcagccttgttgagtgcggtgaggatcttcgtgatctcgtcgctggggctcttgccgtagcgcgtcttgtagctattgaggtacatgatgtacatggagagattcagctgaccggagagcttgccatccttgacggagaagctacctacctggggggcgaagggcatagcaccgtgcttagcggagtggatagtagtacccttctttgcgtcgtattgtacttcgtattcgcgggtgccttgcttgccggtgaaggtgatcttgttgtccttgagcgtgacctgagtgaacttgcccgtgccgaggactgcttcgccgaagttgaactcggtgaggttgatcttaccgatatcattgagggtgacttctgggggagtgaccgtcaccttgctgatggtgtaggtgccatcggtaccggtgacgacggggttgggtgttggcttgggctcgttgttttccttgccaccacaggaggagaggccgagggtgagaccagcgaggagaaggaccgaagcccacttcttggtattcatgtctgtgaacggactatgtgtgatatgatgccggaggggaaagtccctccctacagggagcaaagatagctcaatatgtaggcttagtagctcacagtctgcaatatacctatatataggtaagcgccccagatagcacgtgctatctggggcgcctttacctaacaagtagtggggattcgtaggcttaagccttcttaccctggttggctacagcctccatgagcttcttgatctcttcggggtcaccgaggaagtagtccttgacaagacggagctcatcgtcgaactcgaagacgtaaggaacggccgtggggaggttcagctcgacgatgtcttcgtcagagatacccttgaggaccttgatgataccgcgcaggctattgccgtgagctgctacgaggacgtcatcgtgctgcatgagcgaggggaagatcttgtcttcccagtaggggagcgtacgagcgaccgtgtggcagagcgcttcggtcaggggcaggtaagcaggtacgacacccgagtagcgggggtcagcctgaggtgcgcgctcgtcggtagcagccagaggcgtgggaggcacgtcgtagctacggcgccagatcttcacctgttcgtcaccgtacttctcagccgtctcagccttgttgaggccctgaagcataccgtagtgcttctcgttgaggcgccagctcttctctacggggatccagtcgaggtccatgacgtcgaggatctggttgagggtcttgatagcgcgcttgaggtaggaggtataagcctgcgtgaagtggaagccgttttccttgaggatggccccagccttcttcgcttcttcgacacccttctcggagaggtctacgttcgtccagccagtgaagcggttctccttgttccacacgctttcgccgtgacggatcagtacaattctcttcatgattcgttgatggtctataaatgaattactaatgtgctcgtttatcgactgcaaagatagccaaacttatccgtgccgattgagtcggccgaggagctggcgtacgggctcccgccagtcctcgccattgaggggctggtaggtgtgtatgccgaactcccgcgccatggctacgttcgcaggaccgtcgtcgaggaagagcgtctcctcggggcgcatattcccctcgcgcagcatcgtctcgaagatacggcggttgggcttgaccatccccatctcgcaggaggcgaacttcttctcgcagaaggacgagagcgtgcggccactggggaggaagcggtctgactcgcagaagtccatgacgtagggattggtattggagaggatgaagatgcggtagtccccgagctcctcctcgatgaagtcgaacttataggcgtctacttcgctgaggaagccgaagtaagcgtgagcgatgtcgtcgtaggtgagtgtacgacctgccagcgagctgagcgctgcacggaactcgggctccgtcatacgcccgtcctcgacctggaggaagtaaccactctgaaggtagggatccagcatcttctcgacgtcaggtaccccaagggcagcgaagcggcgtagggcctcttcacgatccagtcggaagaggacgccgccgaggtccaatacgatgtttcttatcattcagtgtttagggtttgggttgcatcgtgatcagcgggatgagcatctcttcgagtgagatccccccgtgctggaaggtgtcacgatagtactgcacgtagtagttgtagttgttgggataagcgaagaagtcatcgctgtagctgaagacatagcggtcggagagattgacctgtggcaggccgatcttcgctggtacgatggcttcgtagacctccttggggttgtaggtaagggtcttcccgaccttgtagcggaggttggtattggtgttcttgtcaccgacgatcttcacggggttcttcacgcggatggtaccgtggtcggtggtgaggatcacgcggtagcccatctcggagatgtgcttgaagaggttgtacgtcgtcgagtggcggaaccagctgcgcgtcagtgagcgatacgcagcctccgtgttggccagctcgcggatcatcttgctctcggtgcgggcgtgggagagcatatcgacgaagttcagcacgatgacgttcagctgatactgcttgaggctgttgaggttgcccagcaggcgctcgccgaagcgggcttcgtagaccttattataggagaaggaatagttcttgcggtagcgctggatgagcgtctggatcatcggctcttcgttgaggttcttgccctcttcgctctcttcgtcgacccacagatcggggaacatcttcgcgatatccagcggcatcagccctgagaagatcgcattgcgagcgtactgcgtagccgtggggaggatcgagagatagaggtcttcgtcgaaggtgtagaactcgctcagcatcgccttcaccgactcccactggtcgtagcggaagttatcgatgaggatgaagaagaccttctcgcccgagtccaggagggggaaaaccttcgtcttgaagaggtcggggctcatcagcgggcgcgtctcaggctcacggatccagccctcatagttgcggctgatgaagcggctgaagaggcggccagcatcggtcttctgcatctccagcagctccttcatctgtgcgtcgccctgctccagctcgatctcccagtgtacgaggcggcggtagaggtccttccattcgtcgatggagaggcggtcgctcatctgcgcgctgagctgagcgaactcctgacgatagttcatcgtcgtggcttcgctgatgatcgtgctctggtgaaggttcttcttcagggacagcaggagctgattgggattgacgggcttgatgagatagtcggtgatcttaccgccgatggcttggttcatcagctcttcctcttcgctcttggtgatcatgatgacggggaggaaggggcgtagctccttgatgcgctgcagggcatctaggcccgtaatccccggcatgttctcgtcgaggaagatgagatcgaagttctgggtctgtacggcttcgatagcgtcggcgccgctgaggacgggcgtcacttcgtagcctttctccttgaggaagaggatatgtggcttgagcagatcgatttcgtcgtctgcccagaggatctgatatactttgttgctgctcatactttgcgaagataataaaagttatgggggctctccccctaactataacggcagaggaggcctcctcggtgccctcacctcgatgctattcttcggagcttcgtctgctggctcctttttcttggtgggagaggagtgcgggagaaagcgtgcgccccgccctatccatcgtgatagagtggggcgcacggctatgtggagataggcacggggtctataggtcaagcggcgtcttggggtagaggtgatcccaccactggctattgccctgcaggtgcttggcgaaccatgcctggatcgtctgcatccagcgatcctgtcgctcgggctcgaggatgtggtggtcttcgcccgtcacttcgatgagctcgacggtgcggccgaggatcttcagcgcattgtacatcgcggtgctttcgctggggggtacgttcacgtcggacgtcccgtgcagcagaagcaggggcgtgtggatcttatcggcgttgaagagcgggctgtgcttggtgtagaggtcggggttgttccaggggtagctaccttcggaggccaccgtgctgtagctcataccccagtagccccctgcccagtagctggagatggagctgatccctgcgtggctggcggcagcagcgaagaggtccgtgcgcgtctgcaggtactgcgtcatgaagccaccatagctggcaccagcgcaacctatcttcttcgcatcgacgaaggggtgcgcagcgacaaaggccttcaccgcaccgatgatatcgtcggaggtcttcgtgccccaagcattcaggtggtcagcagcgaagctctggccgtagcccacggtaccgcgtgggttcagcgaataggctacatagccctgagcggcgaacatcgccaggtcgtacgtcgtctccagctcgcggctcagagggatcgtcccgccgtagtagtagacgatcatcgggtacttcttcgaggggtcgaagttggggggcaggtagtaccagccgtcgatatcgacaccgtcgggcgtgcggtagacgaagtcctttgcaggggtgaacttcacgccacggagcttctctgccgagatgtcccagatgagcttgctcttgcccgaagcatcgaggctgtagaggcggtcggcattgttgaggctttgcccgaagtagtagaaggtattgccgtgcgaggcgacaccgaagccacggacgacgtcttccttcgtgtcgatctgcgtgatcttattcgtcttgacgtcgaggcggtagaggctctggcggctgccgttgtcagcgaggatgtagaaggccttgcccttagcgtggtactggacgtggtctacgctgggatcgaagtcgcgcgtcaggggtgtgacacggcccgtggggatattgacgcggaagagctcgtgctcatagccgttgcccgcgcgtccgttggggagcgtattgcccacaccgccgaagctattgggcgagcccatagccagcacgtcctctgtgccgggaatgaagcttacgctaccgatctcaaactgcttcgtgaagaccgtatcgatacggcccgtggcaggcgtgtagcgcagtactgtcgtctggtcgaaggggctgtgctgccagtccttcgtgtagaggcccaagaggagttgactgccgtcagcggagaagtcgaggaggctcaccgagcggtagccgtagagtacgggttcgtagactcccgtggcgatatcgtagcgatagagcgcctgacgatcgcgcgcgcctggctggcggtcatcgggcgagaggcggcggatgaggagcttatccttctcggggcccttgacctcttcatagatatagatagagcgcttgtcggggctgatcataaagctctccccagggatcttgtcgatccatacggtgctgcgacccgagacgggatcgatcttcaccagctggtcgctagcgcgattcgaggtcttcatcacgaggatgtcctcatcgggcatccattcggcgccgtagagggactgtgtcgtgcgaaggaccttgcccgtcgcaccctcgcggatctcctgatagctgacgcccttcttcggagcgcgctcggtgtaggtcaccagcacgtacttgcccgagggggagacgtgggtgtaatagagacgcttgccgtgggtgaggtagttccagttgatgtagcggacaccatcactcgcagccttgaggtcgagctgaggcaggccttcctcgggctcaaatacgagcttgaagtccccacgtgccttgtcctctgccgtagagagcaccttgacgacgaggttcttattcgtagcgatgagcgtcagcggcacggatacagcaggcaccgtatcgctctcggcgagcttatcttcattcgagcctaagagtgtctcgccatcatagagcgcatagcgagcacggccatagagcttgagtgtgcccttggtgaagccttggctgatgagggggaaggagtaagaggagaacgtgctggcaccgctggcgggctgggcaacggcgaagaaaccattggatgccgctgcgacggatgtgcccttgagcccttcggtcttgtaggaggtcttcagcagggagccgagagagaacttctggttgtggacgtcgaccgaatcgatcatcacgggacggctcactgcgtgggtgccgtagctcgtcgccttcgtgagcgtctgcgcctgggcggtgctccccgctaggcagagggcgagcaaggcgaggcttgtagtcgttcgtttcatagcgtttgatagatgtgtatgtatgtgtcgtggcggaggctctgaggtgtgcggctttgcgaagccctgcaagtgtctccttagggcaaagatacgaactacggcgataaaactctctatctctgccccagatttctcacgtcgcgaagaccgcccttcacaagggctgtagaatgcaccccataaggggaggcaaatcaacttatattggtcagcgggcgaatctatatcggagactgttgtcgcgagtcctgtaccctatttcgagtgctaaggcatcgcacgcccagctccccgatatctctcttcaaagtgctcaagcaagccctttgccttatcacgagtattcctcttatccagcggaggaaaaagtgctattctcgtgaagaaaaaagcgccttcccgtagtggtattcttctatctatgcacgtagtcttaaagaccaggtacgtaaatccaaatatccacgtacgtagatttatcgtccacgcacgtagcccaaacttatctgccactcgtccataacttttatccctatgcggagcaacaatctaatatagctctacccacgtacctatataggttcgcccgctgaccaatataggttcataccaccctccactatagaggtagagattccccatagcgagcgggcttcttctgcaccctcaaaagacgcctcgttgtgccaaaaggcaagggagatctatctctttgcttgcatatcctttgcttttgtgaggaaatgctacctttgatagtactaagatccacaaacacaagtccaatacgcacactatcatggcacattaccgcagactcctcctcggggctctcacccttgtcctcggggctctcttcatcatctcgtgtcgtcgtacggcacgtgtcggcttcaccgaagtcgatctcaagaacctccctacttgcgattacctcgtcgtcgactatcccctcaacgtgacggtccatgttggcactcagactgccgtcgcctttgatgagaaaatgccgaagcgtatccgtgaggatatcgaggtgaaggtcaaggacaacatcctcctcatcagttcgcgccacgagcgcacgggcgtcgatccctttgatgatgtccagcgcgggaagagcgcccacatcgatgtgtatctacccaagctcctcggggtagaggctacctatgccgctaatatctccgtaccagacagcctccgtcagtcgtccttctccgtcgtcctctcgggggcgtctgacctcaccgaccttcgcctcaccgccgacagtctctccgtcagcacagcgggtgcctcgggcatccgtggctgggtgaacgtagctaagagcctcgagatcatctcctcgggtgcctcctcgatccgcctctcagggcaggctgactacctatcggtgagcctctctggggcctgtgacttccgtgctgagcagctccatacgcgtgctgtcgaggcacttctcgcaggagcttcgcgcctcgaccttgggaatgtcgataccatcagctatggcgtgtcgggagcttcgaacctcagataccaaggccagcccgtcgtgatcggtcaggtcgtcacgggtgccagcacggtgaactcttcgcctactaagtagcacgcgcctccctttcctcatccccaaagcaaagcgagggggctacggacactgcgtccgtagccccctcggcttatatatcaggtgatgcgcttagctccttagtagctgatgcggatcgatgcgggcttgctctcctgccagaagcggttgatggccgtcaccatatagcggtaagtcgtgccacgctccatgctgggcagtatgaagtagggattggtagagatactcatcaggtagcgcacgtcagagatatcggggcgcgtaccttcggggaaggcatacacggcatagtagaatgccgtctcgggatcgctgggctcgcggtagtcatcccagaggatcatatgcccgtcttcgttggtgtcctcgaggatgaggctgatagcggcaggggccttcgtcttaccgagagcaccgtgtacctcgggaaggagcgcacggtaggtctggtagctggtgatgaggctatcgccaagacccttgtagttcttcacgagatcttcgcctgaccaccaggagttaccactgctgttccgtcggctgagggcgagcttctcctcgagctgaccgctgtccatcgtgcgagcagcgtgctggccgatgtagagctgtgccttcttctgaggggtgtgcttgccccaccagtgcgtgagctcagcgtagtcggcagcctgatgaccgatattccagtagatctgagggacgatgtagtcgacccagcccttacgcacccagtgtaggacgtcagcgtgcaggtcatcgtaggtctgcaggcccgaggtcttgctgccttcgcgtgaagaggcttcgttgcggtagatgccgaaggggctgataccgaagcgcacccaaggcttagtctcgaggatggtctgacggatcgtgtagatgaggcggttgacgttctcacggcgccactcgttcttctgctcgggacggtaacctgccgtgaggccgtagcggctgaaggactcttcgtcatcgaactctaagcctgcctgtgggtaggggtagaagtagtcgtcgaagtgaatggcatcgatatcgtagcgctgtacgatgtcgcggacgatggtgctgatatagcggatgctctgtggattgcctggatccatgtagagctgcttgccgtggcgtatgaagagctcgggcgagtgcttagcagcgtggttaggcgccagataagcctcagcgttgcctgcaccacgatagggattgacccaagcgtggagctccataccgcgggagtggcactcgtcgatgacgaagcccagagggtcccaagaggggttaggagcttcgccctgcttaccggtgaggtacttactccagggctcgtgggtgctcttatagaaagcgtcaccctcggcacgcacctggaagatcaccgcattgcaaccgaggcgctgcaggagcgcgatgcggttgctcaggagcttacgggcttcttcgcgagagagcgaagcgtagtcgctgcggtagatcgtcgggagccaagcgccgcggaactcacgcttcacaggctgcttcgggtcggaggggcggctctgtcgggcacttataccgcacgaagcgagcagccacagcgaggcaaaggccgagagtagaagggcggtgccacgtgcaccaagggggagtctgacgttcatcggagctaaagaattaggcgaggtggatcagctgataggtatagagtacccagaggaagaaggccacgaagggcagcgtgaagaggaggctgtcgatgcggtcgaggataccaccatgaccagggatgatattgcccgagtccttgacaccgacactacgcttgaccatcgactcgaagaggtcaccccacgtagcggcgatagagatgatgacaccgatatagcactgctcccagccgaggagaagacccgtagcgacgacggctgcgatgagcccgccgacgaagccttcccagctcttcttaggtgatacggaggggaagagcttatgacgtccgagagtcgagcccgccagataagcgcccgtatcgttggcccagatcgagacgaagatcgtgaggaggatgatcgaggtatcggtatcggtgtagaagatattcgcgatgctgaggaagcccccgacatagatctgtccgaagatcaccttcgccaagtcggtcggcatagcctgacgctcgctgtagatgctgcgtaccaagatgtagagtaggtagccagcgtagggaaggaggaaggcggcgtacgcgatccccttgtcagcgatctcgtgagtcgcccagaagagatagactgcagccgtagcgtcgaagatgcggcgcagggggaagaggcggtgagtcgacacgaggttcgaccactcccaggtaccgaggaaggccaagaggccgaagacgatcatatagacgaggtgctcacgcagcaggagtgccgcgaggatcaggcctacatagagggagccgaagatggctcgcttgacgaggttactcattcgatgttgcttctgtatctgttgttggggttgtggattcttgttcttgtccctgctccttctcctgattcttttcttcgtgctccaggatcatttcgtcagtgcgactgacccaagggcgcttgccgaagatgtgctctacgtcctcggtgtagatgacctcacggtctaggaggagctgcgtcagcgtcttgaggccttcggcatgctcacggaggagctccttagcacgctcatattcgacacggacgatctcgcgagcctcttcgtcgatgagctcggccgtacgatcactgtagggcttcgtcaggccatagccatcaccctgcatatcgtagtagttgacgttggggagcttgtcgctcataccgtagtaggcgaccatagcataggccgtcttcgtggtgtgctcgaggtcgttggctgcacccgtagagatgcgaccgaggaagacctcttcggcggcacgacctgcgagcgtggcgcacatctggtcgcgcagagcttgggtagtggtgatctgacgctcctcggggaggtaccaagcggcaccgagggccttacctcgaggtacgatggtgaccttgaccagcggattggcgtactggaggaaccagctgaccgtggcgtgtccagcttcgtggagggcgatgctgtgacgctcctcttcggtggtcatcttgttcttcttctccagaccaccgacgacgcggtcgacggcgttcataaagtcatcacgggagatgaactccttgccagcgcgggcagcgatgagggctgcctcattacatatattggcgatgtctgcacccgagaagcctggggtacggcgtgccaagaggtcgacgtcaacagattcgtcgatcttcagcgggcgaaggtgcacgaggaagatctccttacggtcgtggacgtcgggaaggtctacatagatctgacggtcgaagcggcctgcacgcaggagggcggcgtcgaggatgtcagcgcggttcgtagctgccagcacgatgataccgctattggtgccgaagccatccatctcggtgaggagctgattcagcgtattctcacgctcgtcgttgcccccgaggttgttgttgcgaccacgggcacgacccaccgcatcgatttcgtcgatgaagatgatacagggggccttctccttggccgtcttgaagaggtcacggacgcgtgaggctccgacgccgacgaacatctcgacgaagtccgagccggcaagcgagaagaagggtacgtgtgcctcacctgctacggcctttgccagtagggtcttacccgtccctggagggcctacgagcagtgcgcccttggggatcttacccccgagttgcgtgtacttagcgggattcttgaggaagtggacgatctcctcgatctcaaccttcgcttcgtgcagacctgctacatcgttgaaggtcactgaggtgctctccttctcatacagctgagccttgctcttgctgatattgaagataccacctcctacaccgccacctgcgccacccgatgagcggcggaagatgtagatccagaagagggcgatgatgatgaaggggacgatattggccgtgagagagatccagcgggagctctcttccttgtaggctaccttagcggtcgtgccgctcgtgtcgtaggcttcggcgaagcggtcgacggtagggatctgcgtctttaccgtgtactcgatgcgcttctgctcgcgacccagcacgggagagcggtgggtgaagagactgtcggcagcacgcttgttcagctgcgccgtggcggtcttctccccgcggtcgacggtgatctgggtgaaggcaccctgattcatcatctggcggaattcgttccaactcatatccttattctcaccgaagccaccatcccagaggaagagccccccgaggatagcgaggatgatcgcgtagatccagagttcgttgaagcggaagggacgccctgacccgcctgttttcttttgttctatcattcgttatctatgttgtcttgtcgtttgagcgggcaggcgtatccggccttagtcccactcttatcctaacaaagacgatgccatcttagttgcctgcgggtgtgcgtaggcgtagagctgcagagcgtgctccgtagccctcggctcttcccccgatgtggggataaagaaaaaaagagcgacgaagagagtctcgctcacttgatcgctcatgctatatactgcggagagggcgggattcgaacccgcgaaacgcttttggcgtttacacactttccaggcgtgcctcttcaaccactcgagcacctctccttatcagcctgcttaaggcttctacttaattggaaagctccgcaaaggtataataatatctgtatactgccaaactgccacgctttcagctcgtgtctcggacgtctgtggcagactttgctggggaggctgtgcgaggtaagtagcatgtgccttgtggaggggggggatgtggaccagtactggtcggcacgcgaaccagtactgctcactcatagtaaccagtactgctccgagctgtgactagtactggtcgctttatcgaccagtactggttgcattttccatccttggagtgagtggggatagtggatgagtgaaagggggaagaagctcctctctaccagccgaagaggttacgtgcgatccaccagccgatgacagcgatgacgaggaggccgagggtcagcggatgctgaaggatgcgcctgaggcggggtgctcgctgggggaagagctccgcgtagccgtagagaaggagaagggggatggtgaagaggagcgcgcggttgtagctgaaggcttcggtaaggtgcccatggaggagggcgtgagctgcgcgctggagtccgcaccctgggcagcgatagcccgtggcggagcggatgatgcagcgagggaaggggtaggtcgctggatcaagaaaagcatacagccccacagctaccccgaggagcagaagcccgatgagtagatatcggcgctgcttgaggggggagcgatggggctgtgtaggggggaggggagtgtgattcatccccgagagaagggacgctatccgacgggggacttagctgatgatctgcaggagcttggtgtagttctggttgcgagtcagatcctgaatgttgaaccagtcgatgatcgtcaggatgccacagccaccacacgtgaggagcttgagcacgccatagcccgtgtcgccgagcataaagcggtcgatgccgagtgagcctgcgaagaccgatacgatgatcatcatcgtgggatccttgtagtccaaggcgttgatcagggtgaacttgtcatcatcgagggcgagcagacggtccttgatggtgaggatctgcgttgggctaaagaacttctggttagcggcaaggaagaggtctactttctgactgtccatagggttgatgtatttatgtgtgcgacttgatatggggactatttagagctattgtgctgcgaggcgtgggcggccttgcggtcacgcacctccttggcatattgagcggctttcttacggcccttactgtcggtgccgaaggagtcgaactcgaagcgctcgggcagcgtgcgagcgaagtccctcacgcggggctgtccggccgcgcccttgtcgatgacgatggagtcatagagacgtttcgtctcgggggtgatgctgtcgggatgtcccttgacgggctcggggaagcgataggaggcgtaggagatagtggcggagtcgacgctgatgcgctggtagagcttgagacctgagcctaagcggtcgtgtacggcgtcaaagccattgcggtagaccttaggcgaggcagagctgatgacgaaggcaggggcgatggtgtcacccttttcgccgcgcgtcgtactacgggcatagccatggtcatgcccctgcaggacgaggtcggcacctccctcgatgagctcgtccttgaagacgtagtgcatcaccagattctttcgcccgtcacgcacgcagtctacggcgtggtggaagaggacgatctgccaaggttggtgcgagcccttgagggcagagcgtagccattccttatgctgattgatagcacccagacccataatgtctgtggtgtccatgacgatgaagcgcaggagcggcatgtcgatgaagtagcttcgcccgaggaagtccttcggcccattggtagggtagccgaactgacgtacccagcgggggtcgagttcgcgcccgaagcccttcttcaggtactcatggttgcctggtgctgcgatgatggggatgctgcgcgtgaggctgccgatgctggtgtaccacgctctccaataggcatccgtaggcccctcgatctggtcacctgcgaaggcgaagaagtcgatggagtcagctgcgtggcggaggtagtcgaagtagcgcttgctctctgcgataccagggtcctgcacatcacccatatagacgaagtgcgtcgcacggccttcgctgggtatagcgaagcgtcccgagacggggtcagtgccctgcacacggatcgtgtagaggtagctgcgccccgagatgaggctgtcgagatggacttgataatagcaaccacggcccgagcgggaagcgatgatctcgctcgtggggacgaaggagatggggcggagggtatcgcccttctcgttgatggcacgtaggagaagctcagcgggctgggcggtctctcccgagagccaagtgatcgtgcgctgtgaagcgaagtcctcgccaggcgtcagcgtgacgcggctcactgcctgctcggtcgtgtaggcttcttcgggcacattgccgaaccatgcacgccagcggagcttaaagagaatccctgtcccgacgagcaggacggcgaggacgatgagggcgatacgccagcggcgcttcctcttggggggctgatgcccgcggagtgtggagcgtctgcgtctcttcatgctttagagggtatcggtggtctcctcgctagaggggagtgcctctctggactcagcggtagcgacgctggccttgaggttcgtgagctcacgctgcagttcgtcgcgctcggcatcccacttggtcttctcttccttgagggcgcggacttcctgtccgaggctgtcccattcgtagagcccacggacggagagtccgatagccatcgcagctacgacgccgatgacgccgagggaggagacgggtaccgtgccttcggctacgccaggcatcgtgagatcccagaggctatagcagaggatggggatgatgaagccgatgagtgcagccaccagcgtcatccacagatagggctggaagaggcggcgacgcatcaggcgtggtgcgaggacgaagtagttgaggtagaagatcacgaccagatagaggtccgtgagccacgtcgagtagtagagtcggggattggtgaagaccgacatctcgggcgtcccctgcacggtcgtcacgagggtctgcaggatgatcagtacgatccagacgagggcgtagatcgagacggatatggtgcggttggcggacttagtactcattgtctaataggatatgtcgtgaagaagggggttagatggtgcgctcggcgatgtagtcggcgaggtcgatgagggaggagcggtacacgctctcggggaaggataggaggagcgtcttcgcctcgtctatgtaatgatagaggcgctgccaagcgtagtccataccaccaccttcgtgggcgagggtggtgaggtgctcgatgctctcctcggcgatgggcttctcagcgaggagctggaggtaggaagctgccttaccctccttctgaagctcggtgaggacgtggagtagggggagggtgatcttaccctcacggatatcgttgcccgtgggcttgcctacgtcagagcggtggtagtcgaagatatcatcacggatctggaaggccatacctagtgcagcgccgatacgggcggcacggtcatagtctgcggcgctggcctcgacggtgatcgccgcgacctcggcacaagagcggaagagtacggcggtcttctggaagatgatatcgtagtaggtagcttcgtcgaggatgatgccctcggcagtctcgaactggcggatctccccttcggtgagctcgcgcccgatagccgagacgatacccatgatacgtaggtccgccagagcgatagctcccacgagggcggaggagaggatgaagtctcccattagcaccgccacacggttgtcgaagagcaccccgagggtggggcggccacgacgggtctttgcctcgtcgatgacgtcgtcatggatgagcgtcgccgtatggatcagctccagcagcacggccgcatcgatgctccgctgtgggggcacgtcaccacgcagcagccccgcgatgagggctgtgaggatagggcgtacctgcttccctgtggaggcactgaggtgctcgatggcttctttcagccattcggacttggtcgcgaggatcgaagtgaactggctgtggaagtcatccacgagggcggccacgggggctttgatctgattgaggtcgtgcatgggctgtcggcgcatcgttaattccttgcaaaagtagctaattctcctcggctaacgctcatgaagcagccaccccgcagtctccacgcccctgatatatggggatgagagactgcggggtggctggtcgtatatataaggtacgcgcgtggagcgaggtgcttagccgaggtaggcagctaccatccaagcggtcttttcctgaccgtcgaggaggtcagagaggaggtcgctggtagccgtgtcgccagcttcgtcagccagggcgagggcggcacgctcctgggcgatgagtacgcggagcgattcgaggatagcggagatgatgtcgctggcggcgctgacgttggtctgctccttgagctggctgatcttaaggtattcgctgaagcggttctcaggcgtagcgccgagctggaggatgcgctctgcgatctcgtctactgactcagctgcttcgtcatacatcttctcgaactggctgtgcagcgtgaagaactgagggccacggacgtgccagtggtagccgcggaggttagcatagtatacctggaagtcagcgaggagctgctggagacccttgacgataggtgcgacctggttagcgtcgaggccagtgattgagagtacgttcattgtcttgtcgtattaagtgttaatgattacactacaaaggtaggggagttaatgaatctatacaaatgaaattctctatatcgatataagcatcatttatactttgcctctacctacttcatacagcgcacaaacgaatcccgcccctacgactgtccaaggtaggacgtgccgtaggggcggggtgtagtttatggggagtgatcccttaggcttcagcaggtgcttcttcttcagcgggagcttcagcaggagcaggagcttcttccttcttttcttcagccttaggagcgtcggagaggacttcgacggggatttctacagccacttccttgtgcaggcgcacgatagcggtgtagttaccgatttccttgatagccttgatgtagacgagcttgcggtcggtttcgaggccgagcttcgtgagctcttcagcgatctcagcacccgtgacggagccgtagaggctacccgtagcgacgttggtgtgagccgtgatagagaggcgtacgccctggtacttctgggcacgctcttcggcttccttcttgatagcggcgatcttgtgagcgcgctgacggaggttctctgcgaggatcttcttcgcagcttccgtagcgatgatagccttaccggtggggattagaaagttgcgaccgtagccgttctttactgtgacgacatcgtccttgtagccgagaccgactacgtcttctttcaaaataacttccattgtattctgtctcctctatgtttattcgttactaagtggatgagtaaggggggatagaccttacttagccatgttgtccgtgacgtagggcagcagggcaaggtgacgagcacgcttgacagcctgtgcgacgcgacgctggaacttgaggctcgtgccggtgatacggcgggggaggatcttaccctgttcgttgaggaaacgcttgaggaagtcgggatccttgtagtcgatatacttgataccgctcttcttgaagcggcagtacttcttcttcttgctatctacggtcaggggagtgaggtagcgtacttctgatgcagccatttttattttctcctttcgttaatgggttatgccttgcggcttcttctctttgctgcgtattcagctgcgaacttatcctggcggaaggtcaggaagcggaggacattctcatcgcgacggaactgcgtctcgagtacggcgatggtctctggctgagcctggaattcaacgagctggtagtaaccagtcgtcttcttctggatctgataggcgagcttcttcagcccccagttttcttcgttgacgatctcagcgccttcgcccttgaggatgccgacgaactttgcgaccgcttcctttacctgagcttcagataaatcgggagtaagaatgaaaacggtttcgtagttattcatttctctttctgtttagtgagagttaaaaatatcgggcacaaaggtacgcaaatatatcgttttgaccaagctatgcatcagcgaggtggtgcaaagtgccacacgcgcgtaccattattatataggtatgtgtggggcgaagctctgcctcgggagggcgtgagctactcaccgcggaagagcttgcggaaggcctcttcgacggtcttcaccccgacgaggcggatgttgtagccctcggtgctcagtccgtggaggttcgcctcggggaggatcatcgcacggaagccgatgcgctcggcctccatgatgcgctgctcgatacggcccacggggcgcacctcacctgatagccccacctcacccgtgaggcagacgccttcgggtagggcgatgtcgaggctcgaggagaggacggcggtgatgaccgcgaggtctgaggcggggtccgccagacggatacctccagcgatgttgaggaagacgtccttctgcacgagcttgaagcccgcgcgcttctccaggacggccagcagcatgttcatacgtcgcgtgtcgaagcccgtgctggagcgctggggcgtagcatagacggcagagctgaccagcgcctgcgtctcgatgaggaaggggcgcacgccctccatagctacggcgatagcggtgccgctgagcttgaggtcgctctgcgtcatcaggtgctccgagggattctccacgggacgcaggcccgactggcgcatctcgtagatgcccagctcggcagtgctcccgaagcggttcttctgcccgcgcaggatgcggtacatatagtgcttgtcaccgtcgaactgtaggacgacgtccaccgtatgctcgaggatcttcggccctgcgatgctcccctccttattgatatgaccgatgaggatgaccgccacgccctcggtcttgcagtacttcagtagggcagtggcgcactcgcgtatctgcgagacgctcccaggggaggagtcagatagctcggtctgtatggtctgtatggagtcgatgacgaggatctgcggctgggtgtcgatggcggtggcgaggatcttctcgaggttcgtctcggcatagatcaggcagtcatcgttcgtcccgccgatgcggtctgcacgcatcttgagctgggagaggctctcttcgcccgagacgtagagcgtcttgtatggcaggcggaggatggtctgcaggacaagggtggacttcccgatacctggctccccgccgaggaggatgaaggagccttcgacgagcccaccaccgaggacgcggtccagctcggggtcgccgagactcagacggctctcgctgcgctgctcaatgtcgccgaggcgcacgggcttgctggcggtgatgctctgcgccgtgaaggtacggctggccttatcctgcttgccgatgatgatctcctcttcttcgatggagttccatacgccgcactgcgagcagaagccctgccacttggggtactcggcaccgcactcggtgcagtggtagactgttttcttctttgccatcgtgtatcgtgatgctgctgtgattgtgtccacaaaagtagggagaatgcgcctattataaggtatatacgctggggagtctacaccgcgctacggagggggcaaagtcaaccactactggtccgtgcgcgaaccactactggttagcactacgaaccactactggtcggcgagtgaaccactactggttcggctgcggaccactactggttcactcacggaccaatataggttcacccgccgaccaatataggttcgatttgccccctccacgaggacgctctttcttcctcacagaggtcggtggatcggtgtgtgctttggggatgcgtatcgagcagattgttaattctttatgggtgggttaatccccgtatcaagcgggttcctcggtgagctatcgcgagaaaatagttacctttggtagatagtatgccgtgctctattcatacggcagaagcagcaagattcgatgagattgacgaagcgaaaagattatataagacgaagctatataggcctcttgataggcctgctgaccctcccgcttgctgggcagacccgccccaagcaacccgcccctgactctgcagctcagacgaaggcccgcgaatacttctaccaaggggtgctggcacagtcctctggccgtacgatggaggcctttgacctcctgcgtcacgcgcgcgccctcgaccccacagatcccgctattgcctttatgctcggggggaactatgcccagcagggtatgagtgatcgtgcgctctccctcctcgaggaggcttacggggcagactccacgaacctcacttacgcgcgcgccctctcggcaggctacatcgaagcggggcgcatgcaggatgccttacacatcaatgagcgcctctctgcggccgaccccgaagatgacgacgtgcgctatcgcctcatccagctctatgcccgtacgggagagctgaagaaggggatccagctcgccacggagctgcagaagcgcttccagcctatgcccgaggcctatgggcagctaacgaagatgaagatccagctcctcgccctcaccaaggactcggtagcggtggggcgtgaataccgcacttgggcagctctctatcccgaagatcgccgtccgtactacgactggatcctccacctcttccagacgggaggggtgaaggaggcggagaagcaactcgcctctgacgtgcgtgctggccgtatctcctcgggggatgccaccgccctgcgtgtccataagtacatcctgcagaaggactatcccgccgctgaggccgagctggtccgtctcactccagataagaagatcggtgccgacgagaagatcacgctctggctcctgctgaccaaggagtcgcagggcagtgagggctacaccgcaggcaagtacaccccccatatcgctgagctggtcgccgagtatcccgatgacctacaggtgctgaggacctatgcccagctccttcgctacgaagagcgctatcaagaggcctatgacctccttgctcccaagagcaagctccaccccagcgaggagtggatatggagcgaactcctcgacgccgctatcggcctccagtccgacagcctcaccgtcgtcgtcgcccgtgatgccaagcgctacgtccccaccgactggcgcaactatatcgtgctctcgggggaacgcttccagcatgatgatgctgacggggcgatgaagatcctcgaggagggtgctgcggccatcgaccccaagacgggcgaaggcgctgcgcgcctcttcggtttcctcgccgacgtctatgccgagcgtggtggccctgagaaggcactgctggctgacagcctttacctccgcgctatcgaggccaaccccaaggagcccgatgtgctgaataactacgcctaccgtctggcgaaggcggggcgcaacctcgatgaggcggagcgctatgccctgcaggccgtacgcctctcgcccgatgccgcccacatcctcgacacctacgcctatatcctcctcctgcgtaagaactatacgctcgccaagctctaccagcgcaaggccctctcgcaggctggccctgagaagacttcgcccgatatgtacgaccacatgggtgatatctaccgcgggctgggcgagtatgccgaggctatcgaagcctggcagcaggccctcaagagtctcgctgagcgtgagaataaggatgagaaagccgataaggctgagcgcatccgcatagagaagaagatcaacgaagctaagcaagcacagaagaagtaacgaacgatgaatagcaccgcatatccccgccaccagcgtctccgtggcctcctcgtggcagccctatgtacgggcctgctctccagctgtggcctcttgcgtgatgtcagccatcccgatgatgagacgacgcgtaccgagacccgccaagagacgggtgtgaatccccgcctcgccgccttccagtccgaccccgcctatggcccgatgctcaagggtaacctgcaggccgaggtcctcatcggtaaggagacctattcatcaaaggtcaatgccaccatcgtgcgtggccaaggtatctactggtccgtcgtgcccttccccctcatcgaggcagcgcgcgtatggttcacccctcagggcgtgaccgctatcgacaagatccacggccgctatgccgaggtgagctatgccgagctctcttcgctcgtcggcttccccatcagctacagtgatgtggagcgcctcctcttagggaagcccttcttccccgccgaagcccgtggagccaagggcggagccttcagctacggcgtcaccgaagatgggggcaccgatgccgaagccagcctcagcatcgcccgtggcgaggccgctggcgcctatcatctgcgctggctcctcaatgcccagcaccagcctacgagcttcgtcgtcagccagtcctcccgtcagggtgctcctgtcttctcgctgaactatgatcagacggaggcctctgctgcccgccacttcgctgagcgcaccttcctcttcctcggtcgcactacgcgccccgcactcaccatcgactggagtaagctccgtccctacacgggtgaagcgcccgacctgacgccccgcatcaaggagggctacaagcgtatcagtctcactgagctcatcaagctcctgccctcactatgatcgcctacgcccgctatcagctgaggcactgcctcaccctcgccctgctcctcgtgagcagtctcctcgccctcactccagaggccgcggcacaggggcgtaagtccaggaccctccagcgcctcgagcaggagcgtaagcagctccttcgctccatcgaagcctcggacaagaagctccagcagctgcgccgtgatacgcgcaatgaggagcagaccctgcgcaccgtcaaggagcaggtggagcagcgccgtcaggtcgtcgccgtcctcgacaatgaggtcagcggtctgcaggcccgtatcgacatcctctcagggcacatcggccgtctgcaccgccgtgagggtgccctcctcctgcgctatcgtgccgctcttgttcagctccagcgcatcgacacgcatattgaccctgtgctcttcgtcctctcatcgcagaaccctgccgaggcacgcgagcgtcagcgcttcctctcccgctactccaaggcggtacgtgaggcctctgtcgccctgcgtacgacacgtaccgagatcgaggccaccaaggccgaggtcggccgtacccactcggagaaggagcagctcctttctctccgtgaggccgagaagaagaagctcgaagccgaggagcagcagcgtgccgctcaggtcaaggacctgcagggcaagcagcaggtcttagcgcaagacctctcgaagcagaagcagaaagccgaggatcttgaccgcaagatccaggcacaggtagaggccgagatcgtcgcggcccagcgccgtgctgccgagctccagcgtcgtcgcgaggaggctcgccgtcgtcgtcagagccagcgcacccagcctacaccgcccccctccacaggtcgcagtggccgaggtaaggggacgacacccccacctcccccgccacctcctgctgatgatgagcccgaagagcgccgtgcagcgaccccaggtggctatgcgatggatgccaatgagcgtgcgctcgcctcatccttcgcgcagaacaagggccgtctcccagctcctatccgtggctcatactcgatcctccgcaccttcggcgtgcatcagcatagcgagcacaaccgcgtgcaggtcaatagcagtggggtggacttcggcgtcaatggggatagccgtgcctacgccgtcttctcaggcgtcgtcagccgtgtcttcgtcatcccaggctacggcactgctgtcattctccgccacgggaactacctcaccgtctacgccaacctcagtagcgtcgccgtctctacgggctctcgcgtctccacaggccagtctatcggttctgtcggtgcttcgcctgatggctcctcgggtcgcctcctgcacttccagctttggcacgagcgtaccaagcttaatcccctcgcatggatcaaaaggtaatcgctactatcggggcttttgacggcgtgcacctcgggcatcaggcgctcttctctcagatgcgcgactatgctgcccgctacgaagacgctcgcctcgtcatcttgaccttcgtcccttatccagctgatgtcctgcgcccgcacgggagtcagcacattgatccgccccaccgccacctcgagcgattggaggggcttgagggcttcgaggtcgtgccgatgaccttctccgctgagctggcagcccactccgcagagaccttcatccgcgaagtcctgcatgagcagctccacgtgacggatctcttcctcggctatgacaaccgcttcggtgcgggagccaagctcgcctacgaagactacaaggcactcggagccaagtacgctatggaggtcacccaagccgatagcctctctctcagtggggagatcgtcagctccaccgccatcaagtcgctgatacatagtggcgagatgcgtgaggcgcaccgtgccctcggccgtccgtatgccatctatggcacggtcgtcgcggggcagaagctcggtcgtcgcctgggctatcctacggcgaacgtccagcgtgaggatgccgaccagctcctccctcctgatggcgtctacgcttgtgacctcgagctccttcgccccacgggccgctcggagcagcatcatgcgatgctctatatcggtaagcgcccgactctcggcggtgagctggagcgcaccatcgaggtccatatcctcgacttcgatgagatgatctatgggatggaggtcatcgtgcatatcttcgagcagctccatcccgagcaccgctttgcctcgaccgaagagctccgctccgcccttgagacctacgagcaagatacccgccgctacttcgctgagaatacccgctactgatggagataaaaggactacacgtcgcgatcgtacatcgccgctttgcccttggtggagcggaggaggtgtcgcgtcagaccgcctgccttttctccgacctgggtatccacacgcatttttttgcggagacccatatcgagatagaatgggctctgcccgctgatccgctgattgatctctgtcttctccctcaagggatgcgcctctggacaaaggaaagtgccctctatctggtgcgtgccttcaaggagaggggggtgaaggtgctgatcatccctatcgctctgcgcaatgattacttgcccctaattcgggctgcagggatcaagattatttattggtgccatagctctccgctgtgggaactcatagaccgacgtgagcgtgccagctacaaggcgcatcacccgtggtacaagaatctctatagcctgacgctgcgtcgtctgcgtctggcactaacatctgaggagaagctccgtactcgctaccgagatttggtgcgccaggtagactgctttattacgctgacccctgagtatgtgcaggagtttgtatcggctttggggcttaatgacgaggaagcttcgcgctttgccgtcatgccgaatatggccttcctacccaagcataagcccataccagctaaggaccgaccgaagaaaatcctcttcgtcggccgtctgagctatgcggataagcgcccagatcgagtcctccagatttgggagaaggtctgtcaggatctgcctgactgggaggtagagatctatgggaaaggctctgaagagaagttcttacgccgtatgattctgcagaggcagctccctcgcatcacgctcaagggctatatcgctgatgcgacagccgtatatgcatcgggtgctattttgatgatgacctcgacctatgaagggtggggacttgtcctgagcgaagcacaagcgtcgggagttgtgcccatagctttcgatagctcggcaggtatccgtgagcttatcgggaaggatagtacctatggatgccttgttgctccctttgatttggacgcctatgcagctcagcttcgacgtctctgtcaggatgtggagttgagaagtcgcctctcccaagcagctcagacacattgcctcgactatagcccagagcggatgcgttcgcgatgggaagagatatttagccaactctaataccgctcgttgatgaagcctcgtatcctcatagatttggagcgcacccgctatccctactcgggattagggtactatgggcatgcccttgcccggggacttcaggaggctcgggatccatcactggaccttcactactatgctccgacctcttatacgatagataataggaagcctttctcgcctctgcactctctgctcagtgtgcaggcaaagggctatgacttagtccatatcacgcaccaacgtcagcactacttcccgcagctatggggggcaaagtgcatcgtcacccttcatgacttgaatttcctcaccgagcctctccccgagtcgaagcgaaagaagctcttgaagctggtggcaagtaatctgaatcgtgcccatgggatcgtctgtatctccgaatttgtgcggcatgatttggggcagcatcgtgacctcttccagatatcggaggagacccccattgcagttgtgcataatggaatcttcctacccgaagaagggcagatatcaggtatcgctcgagatcctatagtccccaatgcttcctatctcttggcgctgggggtcttgcatgagaagaagcagcagcatctgctcatccctgcactttgccatctccccgaagagttacatctggtcttagtttattcagaggctaagtctgaatatctctctaagatccagtatgcgatccagcaatatcgattggaggatcgtgtgcatctcctctgtgctgtgagtgatgtagagaaggcatccttgctgcagcactgccgtgcgctgatacagccttccattgcagaggggtttggcttgcctgtggtagaggctatggctttagggaagcctatcttcctgcgtcctgctacgagtctcccagaggtcggcggagaggtggcttattacttcgatgaggtaggccccgaagcaatagcaaagatccttatagatggcttgagtgcttatgatagagagccttctcaggctgaggctctccgtgctcgtgctcgtctctttgattaccgtcgtatggcgcagggctacctacagttctaccacgaaatactctccagataaatgaaactagccgtcatcgtccccgtctacaaggtagagccctacctacgtcagtgtatcgattcgatcctgtcgcagagctacgaggatctgaaagtgatccttgttgatgatggctcacccgatagctgcggagcgatttgtgatgagtatgctgtgcgtgaccctcgtatcctcgctctgcataagccgaatggcgggcagagttcggcgcgtaaccttgctctacagcatattgacgactgccctctcgtcaccttcttagatagcgatgactggttggagcctgacatctatcagcaaggggtaagctacctaaccgcacacccagaggtcagcatcatcaactatggctacaaccttgtcacagaggagaagaccatccctttactccctgcagaggagcatttgacacgtgacgaagctctgcttcgctatgtagctacgacttccaatattattaatacgatggtttggagtcgtatctatcggcgcgaggtgattgatgggctgacctttaccgagggctgtaagtgggaggatgttgtatatactcttgaggcactctatcggtgtacgggtggatatcatatcttaccccttgttggggtcaattatcggagtaagcgccctggggctatgacctccgagctactgcctgataagcgatcccttctatgggatatcgagtcggcaatacagcgctatccagatgatgctcatttcttagctttagccaatacccttgcgactaactgtctgtggtatcacattaaatatctatcgtcttttacctactctgtcgctgtcggggagctggagcgctatctgccgatcatagaagagctgaaagctcgtccttatcttaatgccttccattcagcatcgaaggtgaggaaggtgaagcttttcttagcctatccccgtacatcctttgctattcgtaccctcgttcgcaccctgcttagccgtaaataactccctatgaagcttgcggtcatcgtccctgtttataaggtcgaagcttacctccaccaatgcatcgactcaatcctctctcagagctatcgggagctaaaggtcatcctcgtcgatgatggctcgcccgataactgtggggcgatttgtgatgagtatgcagcgcgtgatcctcgagttctcgccctgcataagccgaatggggggctaagctctgcacgcaactttgctcttccctatacggatgattgcccattggtgaccttcgtcgatagcgatgattggctggagcctgggatctatcagtcggctgtgagctatctgcagcagcatccagaagtctctatccttggctatgggcacaacaaagtgcaggacacttgctcctcgccttgccttatgcccgagatgactttgtcgcgagaggaggccttagatagctaccttactgcgaataaacttgctatcgaagcaactgtatggagtcgtatctaccgcctccaagctatagaggggcttaccttccgtgaggggtcgaagtgggaagataacgtctactctcttgaggcattctatcagagtacaggcgatttccatgcgttacctatcgcaggctacaactatcgcatccagcgtcctggggcgattacagcgactgagatcccagatctacgagatctctttgcggatatagaagaatccattgataggcatgcgggggatactacttatatggagtatgctaatactttggccgtgcgtagcctctggtatcacttccgtctgctatgtcgtgcctccgatcgatataaggaagaggtgactgattatctgcagattgccaacaagctccgatgtcgccccttccgtaatctcttccgctcgcggtcgaaacggataaagtttcgcctattcctcatcgctcccagggcatttgttatggggcgacgagcctttaataagctgaaaaataagtcttagtatatagtcttctcatgctactcaagaatatcaccatatccggcctcggcggtgtcgggggctactacggagcgatgctcgtagaggctgcccgacgtgagggcctcggccgtacgatcagcttcgtcgcccgtggcgcgcaccgcgctgctatcgaggagcgcggactgcatgtccacactcccgagcgggacttcaccgtgcgccccgattatttagccgaagatccccacgacctgccacctaccgacctcctcatcctcgcgacgaagagctacgacctcgaggcaaatatccagcagctccgcccgatcatcacgcctcggaccatcatcttacccctcctcaatggtgcggatatcacggatcagatccaggtgcttctccccgaagcccgtgtctgggacggctgcgtctatatctcggggcgcaagcctgcagcgggagagatcctcttggaggccgagcgagagatcttcctcttcggctctcgtggtgctgagcgtagcgctgaggagcgtgagctcttcgccctcctggagtccgtcggcgtgcatgtggtcaatcccgacgacatcgaggagagcatccgtaagaagttcctcatgatctcggcgaccgcgacgggtacctcttactacaatatgacggtgggcgaagctctcgcgtcgcaccccgtggagatgcgtgggctcatcgaggagctctgtacgctcttctccgccctcgggcacgacttaggcgagggcgctgtcgagcgcaccgtcgagcgtcagaccttcatgatcccctccagcacgagctcgatgcacgtggacttcatggcggggagctctaccgagctggagaatctcacgggctatgtcgtccgtgcggcacgccgtatcgggctggagctaccactctatgagcgtatgtacaaggagctcgccacggagccctatcccctgaagcacgattaatcccttacatccactataactatgcgaacctacctatcccttctcatcctgctcctcttcgtggggagtggccgcgcctcggcgcagcagccgtttgagaccttcttccgagacagtacgctccgcctggactacatcctcaccgggggcgagtcgacgactgagatcacgcccgacgaagctcatctgcttaagggctgggctggccgtcgtcactacctcgatagcctcgtcctcagggggaatgctcagctctacgtccatgacgaagccacgggcaagctcatctatgccttctccttcaacccgctctacctcgagtggcgtcagacaccgttggcgaagaccgagcgccgctcctatgaggaggtgctgcgcatcccctttcccaaggctcctgtgaaggtgacgctccgcctgtgcaatgccgagcagcgcaccatcgttgatcagacgcagcgtatcgatcctaaggacatcctcatccgtgaccagacgacgaagcagcctcagaagcacaagtacctcatccactcgggggacagccgtgactgcatcgacctggcgttcctcgccgaaggctataccgaggctgagatgcctatcttcctccgtgatgccgaggccgctaccgaagcgctcttcaactacgagcccttcaagagcaaccgccagcacttcaatgtcgtggtggtcttctctccctccgaagagtcgggcgtcgccgtgcctcgtgagaagcgctggccccgcacggcattctcctcgcacttcgataccttctactccaatcgctatctgacgacgcgcagtgtgaaggcgatcaacgatgccctcatcggcatcccctacgagcacctcattatcctcgccaatagcgacgtctacggcggtggcggtatgtacaactcgtacctcatctcctcgacgcatcacaagtggtacctgcccgtggtggtacatgagttcggtcatagcttcggcggtctgacggacgaatacttccacgaaggcgatgcagcggcagcgagcgaacacgctaccgaggtcgagccttgggagcagaacgtcacgaacctcaaggacttctccggtaagtggtcgcacctgatcaagaagggtacgcccatgcctacgcctacgaagctccagaagacgtaccccgtcgggctctacgaagggggcgcttatctggcgaagggtatgtaccgtgcaagctacaactgccgtatgcgcaccaacgatacccccgacttctgccccgcctgccgtcttgggctggataagatcctcgactacaacctccctccacgccgtaagtaagagcgtagggcgtgcgtcctacctaatagaataggttagcccccaccacaagagcgattagctcgatgtggtgggggctaagtgtatcgtgtcgtaggggcttaagcggataggcccgtgcggtatgctctcgtggagcggtgtgcttagtcttcggaggagaggagggcgcggagctcgtcgggcgtgatgtcgacgatgatctcactgcggtaggcgagcgagatcgtcccacgctcttcgctgatgatgatgaccttcgcgtcggtcttctgcgagaggccgagggcagagcggtggcgcaggccgaggtccttattgaggtcggtgtcgctggcgacaggcaggatacagcctgcagcgcagatcttcccgccagcgatgatcatagcgccgtcgtgcagggggctattcttgaagaagatcgtctcgatgaggcgggcattgacggcagcgaggaagcgctccccagcgtgctggtagggcgtgaggtctgaggtaccttggatggcgatgagggcgcccgtcttcttacgagccatgttcatacacgccagcacgacgggtgcgatatagtcctcttcctcctgctccttcgccgagccttcgcggaagaagctgcggatcttacgccagcgctgggcggagccgatggtgaccaggatcttcttgatctcgtcctggaagataatgaccaggatgatgaagccgatgttgatgaacttgtccagcagcgcacccatcagtcgcatctgcaggacctgcgagatcaagagccagatcccgaggaaggcgatgatccccatgaagagtgagcggctccccgagtagcgcatcgtggtgaacgcgtagtagaggaagaccgcgaggagcagtatgtcgatgatgtccttgatggagatgtcgagccaagcgagcataagggcgatataagtcgggggttagtgtgagcgggtgaagctatagtgcaggtgctcctctctgtggaggtaggggcgggcttgctcgtagagcgtgatggcctcagtggcagcgcgtacatcgtgcacacggaggatctgtgcaccacgctcgagggcgagggcatggaggaaggtcgtaccaccgagggcttcggcaggcgtgcagccgagggggcggtagatcatgctcttgcgtgagacaccgacgaggacgggctgtgtgaaggtgcgggtgaggtcgtcgaggtgcatgaggagctcatagttctgctccgtggtcttgctaaagccgaagcccgggtcgaggatgatgtcgtgcagacccagctcgaggagtttgccgatgcgctcggcgaagtagtcgatgacctcgagcgtcacgtcactgtagtcggtgagtgactgcatcgtctgtgggtcgcccttcatatgcataaggatatagggtacctgcagggcggctaccgtgcggtacatctcggggtcgagtgccccgccggagatatcgttgatgatagcggcgccatactcctcgacggccatgcgggcgacctccgagcggaaggtatctaccgagacgggtaggtcggggtattcgtctctcaggatgcgaagggcagggcgtaggcgctccatctcttccgtgatgctcacctcatcagctcctgggcgggagctgtaggcaccgaggtcggcgatggcagctccttcgctcatgagttcgtcgaagcgagtgcgtagcgcggtctcgcctgctatcctactaccagcgaagaaggagtcgggggtgacattgacgatacccatgacgacggggcgctcgagggtaaggagcttccccgagagggtgagggtcgtctgtgctggagtgagggacatagcgggggcggttagaggagggcaggctgtggggtgagtacggcttccacggggagatcccatgggtcatgggggaggcatgcgatggggcggagggcgaaggtcacgccgatacggctggcatatgggcagcggctgaggtagcggtcgtagtagcccttgccacggccgaggcggtagcccgcctggtcatacgccagagcggggatgacgaggaggtccagtgtcgctgggtctacggctccatcagcctcaaggcggggctcgtagatgccgaagctccccgactgctcaagctcctgccagccagcgaaggcgaagaattccatcgtctcgccgtcaaggacgcgggggaggtagacttgcttcgtcgtagcgacctcgtcgatgagggtgcggaggttcggctcgtcgggtagggcagcgtagagggccacatgctgggccgtctgccagaggggatgctgacggagctgggagaggatggacgcgctccccgagagacggagctcatcggtgagatgctcacggctcagggcacggagctcacggcggagggtgggcttgtccataggctacttcgtcggacgccagtcgtcagaggtgaggcgatcgagagcggccttgacctcggggtcctcctcgttgcgtgcgcggtagaaggcattcttgtccccacccaagaggtcggagatcaaggcgatgaggtcacggcgtaggatgggcatcgactcctgcaggtagccagggcgctggggtacgccattctgctgggcatagcgtgcataggcatagacgatctgctcgccctgcgaatgcaggtagtcctggatcgccttctccgagccgaaggactggaactgtgcgcggtgctggtccgcgtagttgaaggcgaagcgctggaaggtccctgagcgtaggagacggatgtagtaggggttgatccctgcgctgtcgcgcggggtgaagatgtcgggggtgataccgccaccgccatagacgacacgacccagacgcgtgtagtagcgtgtggtgtcggggcgactgatgctatcggctgagtagaactcgccatggaggtagcgctcctcgatgtcctctgcgtaggcttcgtagcccttggcatagctcttctggatgctacggcccgagggggtgtagtagcgagctacggtgaggcggacgacggagtggtccttcagctcgaaggggagctgtacgaggcccttaccgaaggtgcgacggccgacgatgagcgcgcggtcgaggtcctgcatagcaccggcgaagatctcgctggcgctggcactgctctcgttcaccagcacgatgagcgggagctggcgcagacgtccgtcacgagggctcttgaagtcctcacggggatagtgcgcacccttgttgtagacgaggagatcgcccttggagaggaactccgtggcgagtgccgtagcggcctgcagatagcccccgccattgtcgcggaggtcgatgaggatgcgctcgacgccttcggaggcatgctcggcataggcctgctggaactctaagggcgtctgcgtgccccacttattgaggcgtacatacagtacgtgggggcggatcatgtagctggcgtcgatggtaggcacggggacggcgccacggacgactgaggtggtgaaggtcttcccaccacggcggacggtgagcttgacgacggtgtcctcgggacccttcagcgccttcatgatctgctcagaggtgatggagtcacggacgagattcgtcgtgtcagcacgtaggaggcggtcgccaggctgcagaccagcacgctcgctggggccaccctcgatgacacgcacgacgacgacggtgtcgaggagggtattgaactgcacgccgataccagcgaacgagccctcgaggctctcagtcgactccttgttctcctccgcgctgaggtagacggagtgggggtcgagctgtgagaggatcagcgggagggactgctcggtgaggctgtccatattcgtcgagtcgacgtagtactgctggatgagcgaatagatttcgccgagcttcccagtcgctccgcgtcggcctccgatgccgaagtagctggaggtgaatacgcccaagaggaagaccaagacggtgacaagcccgtaggtgattccactcaggagatgagccttacgctcggggcgcggtgagccgggctgctcgttgggtgctgattgcatgctgtctgctatagaggatgatgaaggggcgggggaaagagtcagttagtcctcgaggggaaggtaatctacctggatgcctgcgcgctggaggagctcgatgccgtcgcgtaggcggtactcggtgctgtagacgacgcggcgcatgtggctctggatgatgagcttggcgcactcgatgcagggggcatcggtgacgtagaccgtcgcgccagagctgtcgttggtgctgctggcgagcttcgtgatggcattggcctcggcatggagcacatactgcttcgtctgaccgctctcgtcttcgcagatgttttcaaagcccacgggggtgccgttgtagccatcggcgatgatacgcttgtccttgacgatgagggcgcctaccttacggcgctcgcagtaggagttctcagcccagatgcgtgccatacggaggtagcgcatatcgagggcgagttgcttgtcatccatcataactctttggattgtcttgacacgaggatatagatatacaaagataaggctttgcgcccgaatgtgtatgctttttcggggggctatctgccgaggataaagggagatcctgtgggaaggggcgattaggatcgctatgagggaggaaaagtaaccactactggtcgatgagttgaccagtagtggttcgcacaccgaccagtagtggtaactatagctgaccagtactgcttcgcttcgtgaccagtactggttcgttttacgtgcgacgctgctacttgcctcctatgactgcgggatgctccattaactcctgtaagtcagctctctatgtgttgcttgcttctccctgctatgcttgcttcgagcccatcgaaaagcggtccgcccagcctcatctctcgggatggggctgggcggagcttatgggaatatgtggagcaggtgcgaccttacttcttcggggtgaagatggtgatttctccggttgagtgctttttgcaggtgagtctctgcttggatgcatccaaggtataggtgaatgtgtcaggcttaaatggctcgcgctcgggccctattcctcccggggctatctcacgtgccacgtgaactgtcgccaccatccccttacgggtgtagggaagagaaaggaccttagtcgtgtgtcttttaccctcaccctcttcccgtattaattcctcctctatcctgaatgcgatatgcttatcctctttgaagtatatccaggtctggaagtggtattgttcgccatttggatatttcccaatatagctggaggactcccacatggttttaacgaatggatcctccttaggggcatcttccttggacgaagagcaggcggtgagggtaaagagaatagctccgaggagtatcagggtgtatttgaacttcatatctataatggtattgataattgaattgtcgcaaaggtaggggaaatagtgcatagtcggaaagggctgctgtgcgacctctcacgctctcctaaaagcagtccgccccgcctcatcacaggggatggggctgggcggactgtatggagagttgggtaggcgagtgccttacttcttgcggacgaaggtcaaagtatgggattcatcctcatcagtcactgttccagtgaatttcatgttggatgcatccattgttagggtaagtacctctgtttcggtcttgccattacgtatggtttgggtagtaagtgtagcctccttattgatataggtgtaggtgccctcggatatacttggttcttctgtattgactacaataccattcttgagggtcttgtgagttcccaggacagtaaacttggtgttatcaataaagtggaggagtagcgtttcaacttccttttcaccattctcctgctcggtcccttggataacgcactcccactcagtgccagcgagggttttacttaggtcgggggtgttaggcgtgtccttggagcaggcggtgagcccaaggaggacagctccgaggagcatgaagatgtgctttagcttcatacgatcttttgttatggggttagtgatttactgaatctttgtaaaggtaggagatttatacagagttgcaagccccccttctcctcttcgcgtggagggctgtaaatagattcgccccgctcttctatggagagaagagcggggcgagtcttatggggtatgtgcgggtgtgaccttacttcttgcggacgaaggttaatatcgtgcctgcttcatttggagctttacctgtgagctgctgcttggaggtgtccattgtcagagggagtgccagcttgatagcattatcttcatcatctcgagtattgaagaggagtgtagcgacgccaccttgataggtgtaagtgccctgctcaggatcgtctacctcagtgtcgactaccgcaccattctttatcgtctgttgggtggattgggacgtgaacttggtgccgtcgacgaacttgaggactatcgtagtgactaccgatttgttacctgcgtcggactcccgaacggtggcctcccactcagtgccagcgagggttttacttaggtcgggggtgttaggcgtgtccttggagcaggcggtaagcccaaggaggactgctccgaggagcatgaagatttgctttagcttcataatttctatggggttataaagagggaatgaatactactcgcaaaggtaggtaaatgctgcatactaagcctatagtctcggaagaaagctgtccgcccagcctcatctctcagcatccaagtccgaggcgtgcatagaggtcgtatctcctcccttgtcgctacacttatttatagtgctccgtagaagtcgattcgcaaacgactattggtctcggtacggatcactattggtttgggggtcaaaccactataagtttgcacacgaaaccactattggtttgcccatggatgactattggtttggatacaaacgactattggttcatcggtcaaaggactatagtgtctccttgccttccgtagcttcctccatttccacgggcggaatgtttctccgtgctgtatctcatcgcgcgagccataggcttgagggataggcctctacctgcagctggtgaaggtgctccccataggaggagggtatgaagctttagtgctcgctacttcgacctatattggtcgctgggtgaacctatataggtcgcgtcacggaccaatataggtcgacatcgtgaccaatataggtcagcccacggacctatataggttcgcatcactcccctgcgggaggtgtccccgcactcttgccctataagcgtgtcgtgtcgcgagtaagtcgcttggctgtaatgcctaagcttagtcgtgtgtgcctactccttcacctctcctaaaagcagtccgcccagcctcatcactggggatggggctgggcggactgtatggagtgtcaggtaggcgagtgccttacttcttgcgggtgaggatcagaggttcgtcctcgccctcctctaatgctgtgatcttttgcttcgcagcatccattgtgagagtggctttgcgtgttacctgcttgtcattttctattttatgggaaaccaccgtagctacaagaccttcgtacgtgtaagtcgtttcttccttaaccgtaggattttgctttatgatactaccatctttcgctatgtccttgtagtctgaaagaattacgaggcggctgtcgtctatgaactggagttcggtcgagatgatttcactactgccgtcctcatctgtagccttgaggacgcgttcccactttgtgcctgcgaatgggttcttgttgctgggctcgggggtatccttcttgccacaagcggtgagtccaaggagcatgactccgaggaacatgaagatgtactttagcttcatacgttcttttgttatggggttagtgatttattgaatctttgcaaagataggagatttatacagaattgcaagcctcccttctcctcttcgcgtggagggctgtaaatagactcgccccgctcttctatggagagaagagcggggcgagtcttatggggtatgtgcgggtgcgaccttacttcttgcgggtgtagatttcaggctcgtcgccctcttccatctttgttgacgtcgctgtgatcttttgcttcgcagcatccattgtgagggtgcccttgtgtgttacctgcttatcattttctatttcatgggtaatcaccgtagctacaagaccttcgtacgtgtaagtcatttcctccttagacgtaggctcttgctttatgatgctaccatctttcgctgtgaccttgtagcctgatagatgtacgagacggttgtcgctaatgaagtggatctccccccagagggtttctgtctcgcctctgtcatctgtaacagagcggatgttttcccacttcgtgccaacgaatgggttcttgttgctgggctcgggggtatccttcttgtcgcaagcggagagtccaaggagtatgactccgaggaacatgaagatgtactttagcttcatacgttcttttgttatggggttagtgatttattgaatctttgcaaaggtaggagatttatacagagttgccaacctcccttttcctcttcgcgtggagggctataaatagcctcgccccgctcttctatggagagaagagcggggcgaggcttatggggtatgtgcgggtgcgaccttacttcttgcgggtgtagatgatacccttgcgtacgccgtcctccgtcaccgtgcccgcgagcgtctgattggtgtcgtccatgacgagacggacgatactcgtgacgatcttgccatcgtcctggcgggttgtggtgagcgtgacctccttgccttggtaggtgtaggtaccctgcttaggagtgtctgtctcgctcttgaggatcgtgccaccctgtgtggttaccgaggtggactccgtgacgaacttcgtgccgtcaataaagcgaaggactgtcgtggtggtctctgtcttgccatcatccttcagctcctgctcgatgtactcccactgagagccggctaaggaaccgcttgaagcggggttggtcttgggggtgtccttggagcaagcactgagcccaagaagtgcgactccgaggagtgcgaagatttgctttagcttcatatctactgtagtattaaagtgtgatttagagcgcgcctgggtaaacaaaagtagcccttctgtacttataacgttgtagtactctgcgaggtatcttcgctcctcggcgggagcagagggcttagtggagtacagcatcatcctttatatatatgtagaccgatgaagagagcatgggtattaggcgctacaggcgctacggggacggctctggtggagctactcctcaagggtgacgaatatagcgaggtgcacgtcttcgtgcgtcggcctctccagctgcagcacgcgaagctccacgtccatgtggtggatatggagtgcgccgaggactggcagacgggccccgcagcagatgtcgccttctcttgtctgggtacgacacttcgggcagctgggagcaaggccgcccagcatcgtgtggacgtggactaccagctgcagttcgccgagatggctcgccgtagtggggtggggaccttcgtcctgctttcggcagctggggcaaatgctaagtccagtctcttctatatgcgtctcaagggcgaagctgaggagggcgtgcgtgcccttggctttgagcggacgctcttcttccgccctgggatgatcgatcgcgtggtgaaggcacgagtcaatgagcgcatcagtatggccatcctccgtgcgctgaatcgtatcggcctcctgaagcgtcaggcgccgatagccgtcgagacgctcgctcgtcagatgatccgcggtgaggcgaggctgcgtgatgcgggcgaatatgtgcttgccgaaagggcgatcttagacctctaagagcggggtgtcgggcggcttggtgagcgctgtctgccgagtatcgtgaccgcacttaggagagcgagcagggcgagggactactccctcgccctgctcgcttttggtgtttgttcttaggaatgtggtgggtaatggtatttctttaataaaattattaaatcatcctgcttgtgttttaaggaagtctcgctatttttgtcacagagacaacaagatatgctctccgcaagtagccctctcgagggggctcttagcgaggagcgccacacacccactcagacgcataggatggacaagcacctcttctccgcccacccttcccctcacgctctgcaggacacgcccagcgggtccccacctctacctatgcgtctgaaaggcccgtccgccacttgatgagcggtgtcccctactactactcacactaaacgaactattacgatggacctacttcagatcgtaaagggattcaatgaaatcctatggaacaacttcctcatgtacgtcctcctcggcgtcggcatcttctacaccatctacctcggcgtgcctcagatacggcacttcggcctggcgatgaagtacagcttcggctcgatcttcaagaagaaagagaagacggaagatgcctgtgaccagacgaactccttccaagcgctcgccaccgccgtcgccgcccaggtcggtacgggtaatatcgcaggcgtagccactgccatcgctatgggaggtacgggtgccgtcttctggatgtggatctccgcagtgcttgggatgagcacgatcttctccgaagccgtcctctcccagaagtatcgcgagatacgcgacggccaagtcgtcggggggcctgcctactacatcagtcgcggtctgaagagccgagtgctcgccatcatcttctccgtcatggtcatcgtcgccctcggcttcatcggctgtatggtgcaggcgaactccatctccatcggcctggccaacgccttcgggatgaagggctgggtcagcggtatcttcatcgcagtgcttgtggctgtcgtcatcgtcggcgggcagaagcgcgtcacgaccattgccgagctggtggtgccctttatggcactggcctatatcctcggggcgatcatcatcctctttatgtactccgaccagatcctccccgtcttcgagtccatctttggtgatgccttctccacgaaggcggccgctggcggtgcagcgggtagcgtgatgaagtacgccatccgctatggggtctctcgcggactcttctccaacgaagcaggtatgggctcgaccccacacgcccatgctctggctcatgtcaaggatccatccatccagggcttcgtagcgatgtcgggtgtcttcgttgacctcctcatctgcaccgctacggcactcatcatcctcttgacgggagcttatgctgagcctgggctgatctcggtacagatcacacagcgtgccttcgaggtgaccttcgggcaagcgggcgttgtcttcctcgctatcagcctcctcgtctttgccttcaccaccatcatcggctggtacgtcttcggggagatgaatatacgctacctcttcaagtccaaggcggtctacgtcttccgcgtcatcgtcatcgcctgtgtcttctcggcgacgatcttccacgcgaacctcatctgggagctggctgataccttcaatgggctgatggtcatcccgaacgtcatcgccatcgtcatcctcgcgccgcaggtcaagaagctctacaagcgcttcctcgctcgtcgtaagacggagaatatctaagctgcctcctcgctccttccccgtgggcttaaatcacttcgcccccacagctccatcgagctgtgggggcgaagtgatttgtataagtagggagcttagtcgaggacgtggcgctcggcgtggtaggaggagcgcacgagagggccgctctcgatgtggcgcaggcccttctccagcccgagggtacgcagacgagcgaactgcttcggatggatgtactccacgacgggcaggtggcggcgcgtaggctgcaggtactgcccgatagtcatgatcgatacgccgacagcgtgggcatcgtcgatgagctcaaggacttcctcctccgtctcaccgaggccgagcatgatacccgtcttagcggggatgccgctctgggcgatacgctccagcaccgagaggctctgctcgtaggtcgctacgtggcgcaccgtgggggtgagacggcggacggtctcgaggttgtgtgagatgatcttgggctgacaagcgatgatctggtcgacgtagtccagacggccgttgaagtcggggatgaggacctcgacagtgacctcaggtgtcgtgcggcggatggcttcgatggtacgtacccagtgccctgcgccgtagtcctcgaggtcgtcgcggtcgacgctggtgatgacggcgtgcttcaggcccatcttcttgatgctctgtgccaccttcatcggctcgaggggatcgagtggtgcgggggctttccccgagagggtgttacagaagcggcaggcgcgcgtacagacagcgcctccgatcatgaaggtcgccgtgccagcgctccagcactccccttggttggggcatcggccgctatggcagatggtattgagcccgtggtgctcgatcgtatgcttcgtatcggtgaaggtcgagttgtcgccgaggcggatcttcagccactcgggcttgcggacgcgtacgacgttgccggtcttcttctgggtgataggttcttcttgcatcatataagtgatagcccttaggctgagggtcagtgccttcagcctaagggtagtggggagtaaaatagccgaggctaaaggttctgctcgaggaaggtaatgatacgcttgtagaggtggttgcgtgcattacctccgtagatgccgtggttgcggtccttgtagatcgccatatcgaaggggatcccttcggcgaccaggaggtcggtgaagttcatggcgttctgcacatgcacgttgtcatcggcgctaccatggatgaggaggagcttacccttgagcttcttcgctacctcgagggcggaggaagacttgtagcccgtggggttctcctgtggggtgcgcatgaagcgctccgtgtagatcgtgtcgtagtagctccagtcagcgacgggggcgacagcgacaccagtcttgaagacgccctcgccgtggcacagacccatcagcgtcatgtagccaccgaagctccagccgtagaggccgatgcggtcagcgtcgatgtaggactgcttgccgagccacttcgctgcagcgatctggtcttcgatctccttcacgccgaggttgaggtaggtgcacttacgccactcctcaccgcgagcgcccgtaccgcgtgggtcgacgcagacgacgatgtagcccttaccggggagtatctgctcccagccgaggccgaaggcatcgagtacctgctgtgagtcggggccgctgtactgagtcatcagtacggggtacttcttgttggggtcgaagtcgtagggcttgaggatccaagcgttcagctcttgaccacggccgttggggatcttgatgaattcctcacggcgcaggcggtagtccttgaggcgctcagcgatctccttgttgtccttcagcacgcgcagggggcgcaggctccccgtggcatagacggccgtagtcgtcggcgtggtagagttgctgaagatgctgatgtagtgggagaagtcatcgctgaagatagcactattggcacctgctccagggtgaagagcggtcttgcggcccttgggatctaccttgtagatcgagcggcgcaggggtgactcatcggcagcctgatagtaggcattgccctgagcatccatgccgtagaagtcggtgtcgtcatagctgcccgtggtgatcttgcggatcaaagcccccttgtcggagtagaggtagatatggcggtagccgtcctgctcgccgaggtaggcgaagcctgaggggacgaacttacacttcgggaggttgcggctatctacataggccttgttgcgctcctcgaagatgaccttcggtaggagcgtcttgttgttgacgtagtagagcgtgaggtggttctgctggcggttcagcgagaagacagcgaggttgccatcacggccgatgaactcgatgcggggaatgtagtagggtgcgctcttgaagtcaatgggcttcttcgcgcggtctgtgacattgtagatgtgtacggagaccttcgagttaggcgtaccggccttagggtacttataggtataggcaccagggtactgccccgtgccgtagataggcatgctgtactcgtcgacctcactctcatcggtgcggacgaaggccaggtagttattgtcttcgctccaggtcatcagctgcgtggtctccagctcttcttcgtagacccagtcggtgataccgttcatgaccttgttgtgcacggcatcgctcgtcacctggacctcggtgtcgaactcaaacttcttgatgaagatattcccctcacgcacgaaggctaccatacggccgtcggggctgaaagtggggatcatgaccttgccggtggtcgtgctcagtggctcgacgcggttgcggcgtacgtcgtagtggaagacattacccttgctcgagcgacggtagatcgactcttggtcagtgatgaggaggatgtgatgccccttgggctcaaggatgtagtcgtcgaatttcttgaattcgcattcgcgtgccttgttgacgctgaagagtgtgtcgacgagttcgcccgtctggaagctatagcgcaggacggcggtgtgtccgtcgtccatcatcgtgtagtacttcccgtcgctggtggagcgcataccgcgccctgcggtgtaggcgtagaacttacccgaggtgacgtcctcgacttggaggtccttggtgtggtgctgggccagggcctcggtgcttgcacctaagccaaggagcagcagtgtgagtgatagtagtgtccgcataactcgtatgtattagtttgcttttcgacaaagatacaaaaagcaagggtggcaagcgagggactattgtatccgcttcgaggggagtggaaggcgtagctataccgatatacgtatgcggctgcaccgagtgctcggtgcagccgcatgtgtatgtagagggcatcttatagagatttcgcgactgagggaaggctggtcgctatctcagcttatgccccttaaaggcgtagaagagaatatagatgaagctgatgaagcagatgctatacgcatatcggatatctgagatatccttgataaggccaaataggacggtgatgacagccccaccgataagacccatcgtcaatagggatgaaccctgcttggtgtacttgcccagatccataagcgccaaaggccaaaacgcaggccacatcagcgagcagcctaatgccatgatgcccacagagtagatgctataaactccaggaagcactactacgagagcagtccctacgagtgccacgaaagagcatatctgtagggctttggtttgcgagaggtacttcgggatcaggataatacccagtatatacccaatgctgatactaataggagtgatccatgaataggtctctggatgggggagacttaattcctgtgcatagtctataagtgtccctaagacgatggtctccgagcctacgtagaagaatatggcgatcgctccgagtacaagatgaggaaactggaagactgagctcttactattggcatagctcgatacttctgagtcagcagcatcattgtcttctccagcagccttcacttcgggcagtggcgatatgagtgcgacgatccctaagatcacgaagagtccgatgatcacaaggaagggtttgctgaggtcttccagaccaacactaccaccactactggcaaagagagcgataaataatggagatacaggccaagctagcttgttgatcatccccatgattgagattcgctttgccgcactctctgtaggccccagaatggtgacatacggatttatcgcagcctgcaagaacgtgttagccatcccgcaaataaaggaggctaagaggaatattacgaagctcttggcttctgcggacaagatgaacacgccaaatgctatcgcgaacatagcgaaagctgatgccatcgtgcgcttatagccgatcttactgatcagcagtcctgctggataaccaaagatcaggaagggtaagaatgtcgccccgatgagcatataggcttccattgacgagacgcttagcgataccttcaatacaggtacgagtagggagttgatccctaaggcaaacccacatgtaaagaacatgaaggcaagaaataccatcggtacgatgaacttattttctttcatatgagggggatattttggctttcgtgttgtcaagtcacgcaaataaaaagcagtagtttgacttgtagctactgcaaatgtaactaaaatattttaaaattttatctgtgctcctgagatttgtagtgttttcagggtgctttattaaaataaacttacgggctaacggctatatattcgtatgtcttgaggctgcttgcggtggcatttccccttggtcggatcactgggagggaagtgatcccaaagcataagtgcaagcacttgaggtactcgtgcgtgctgcacttcgatagagcaggagctgtgaaggagcgcgggaaaaggtgcgaggctgtacagggaaaggtgcggaggagtatggggaaaccttcgtctatgtgcgtggccataaaatctacgtgcgtggatattaggagtgacgtgtatggatgataaatctacgtacgtggacggagaaaaagcactacgaggtgcaaactatttcccgtgaaggggagcgcttgtcttcgtattggatgggaggcaaagtagtatagatacaaagaatgcggctgcaccgagtgctcggtacagccgcatacgtgtatggggagtgtgcgggacgacttagacgtcacggccagggcgcagggcctcggcgtcgtccagcgtgaggatggagttgaccagcgtggcagcgaggttgctaccgcccttgcggccttcgacgatgatcttggggatgtccttgaagaccttcgccatatacttcgactcgcgtacctgcacgaagccgacgggtgcgacgaccatacccgtaggctgggccttaccgcgacggatgaggtcgcagagctcgatgatggcggtgggggcattacccacggcgaagagtgcattgggatgctcctcgacggcgagacggatacctgcctgcgagcgtgtgatacccttcaggtcggcaagctccttcgtgcgaggatcgttgaggtagcacttgacctgcaggccaagacgctccagcatgcccttgcggatacccgaagctaccatggtgacatcggtgatgatggtgtcgaacttcccgtcgagcatcgcctgatagatgctggataccgcaccagggtcggagtagaggatcttctccatgtcgaagtccgccgtggtgtggatcgagtggatgagtgcccacttgtggtcgagggggatgttggggttcgccagctcgctattgatcgtgcggaagctctcgatcatgatcgcctgaccgatcttcgcatccttgtcgagcgtaccttcgtcatagtagccacgaggggtgatgaagtgcccgtcgaagctgtagctctgcgtattgccgatgatcacgacggtgaacatgtcgagctcctcgggatcgaactctgcgagcgtggtgagcttgacgacctgctcctcacgacccgcctgacggacatagccgatgggtgtgtcggggctacggtgctgggcgaagatctccagcaggcggtagatctgccagtagcggccttggctcttggggttgtagatggcggtgatgaagtcgcctgctgcggcagcctcgatgcgcttctcgatacgaagccaaggcgtcatcaggtcggagagcgagatgatacacaggtcatggccgatggggcagccgagcagagcggcggccttctggaaggcgctgatgccagggagtacctctacctcgacttgatccgtgatgcccttctcgcgcatcatctcatagatcaggggcgacataccgtagatgcctgcatcgcccgaggagatgacgcagacggtcttgccctcgagggcgtagcggaaggcctcttcggcgcgctgacgctcagccttcatcccgctgtcgatacacagggcatcggggcggacatagtccttgataaagcggaagtaatacttgtatccgacgatcacatcagaggcctgcacggcttggagtacggcgggggtgatatcctcggggctaccaggaccgatgccagcgacgatgatcttattctttttcatctaaaataggggtacttgaataataagtggagaggtaagatacctgcagttgaatagttttggatttctatcacaaagatagtctatttcagcctataagtataggaggaatggcgagtatcatgcacttcttggctgagcgctcggatgcgacgcatgcctaggtagtactcgatgaagcttcggacgaggaggtagttgaggaaggcgaaccagagcatggtgccactaccgatggtggcgatgctctccgcaacgatgaagtacgacatcgcgccaccagctaccccgatgctcatgctcttgctgtctgtcgcaccgactaagatcccgtcccagaggaaggcgaggtaggagaatatcggtacggctgccatcaggaagctatcgctgagagcgagcttaagcacctcttgcttgtcggtgaggagctcgaggagggggcgggggaagagggcgtagaggatactcgtgatgagggcgacgacgaagcctacctgcagtgtgatgcggatgatcagtcgtaggtgtccgaacttacgcccgccaatagcttcgcctacgagggcttcggcggcataggccagcccgtccatgaagtaggagaagagcgtgaagagctgcatcagcaggctgttggcagccagcctcgtcacgccgatagcgcccccatagcggatgaaggagagcatcaccgcctgcaagagaagcgtgcggatgaggaggtacttcccgatatggaagtagcgaacgagtgtctcggggtgccagaggtactccctggtgaggtggcggaggatacgcccttcgtagcgcaggccaccgagcgcgaggagtaggacggccgtgtactgcgcgagcaccgtgcccagtgccaagcccccgacgcccatccctgcggggaaggcgaggaggtagctgaagaggatgttcagcaggttgcaggcgatgctcacgctcatgacgagcttcatccgctgtacgccgatgagccagccattatacacgtagagtaggagggctgcaggtgcgccgaggaaggagtaatggaggtaggtctgcgcctcggggaggtgcatgtcggcgcctgcctgtaggagttcggctgcgggagcgacatagagcgggcgcaggaggatgaggagtaggccaacgacgagcgcgatgatcgagcctgaggtgagctgacgcagcagggcgcgcacgtcacatgcgccccaagcctgcgctgtaaagcccgtcgtacccatacgcagcaggctccagatgccgatgacgaactgggtgatagcggcgccgatggctaccgctgcgatgctgtcggctgtggccatacgccccgccatcgccgtatcggcgagcatgaggagcggtacggtgacgttggagaggatgttgggtagcgcgaggccccagatacggcgcaggatgtcggagggcttcactttaggcgctctgttcggtattttgctcgaagacaatcagaaggatgtcaccgacttcgagctcgagcttgcccttggggaccatatagttctcaccacggcgcacgaggatcacgagctcttcctccttgaggtccagctccatgagcttattgccctcacggagcatcttgcccgtgacggtgcgctcgaccatctttgctcccgtatattgggggatctcgacgccgaagtggctgaccttgaccttgacctcttcgtcgagaccgaggaagcgcgccacggcaggcaaggtgctcccctggatgagcagcgagaggagggtgatgacgtagacgatgttgaagagcgtctcagcgccctctacctgactcatcatcgggtaggtggcgaagatgatcggcacggcgccacgcaggcccacccatgagaggaagaagcgcccgcgcatgctgatgcgtgggaagaagatgaggctgagttggaccgccagcggacgtgccacgaagatcatgaagaggcccgccagcacggcaaagcctgtgatggggagcaggctcttagcatcgacgaagagcccgaggatgatgaagagcgagatctgtaggagccacgtcagcccatcgacgaaggtctcgatactcttcttgtgtacgagcttcttgttccccacgagcacacccataatatagacggcgaggtagccattgccatgcaggagcgaggtggcggagaaggtgaggaagacgaagcacaggaggagaatggggtagagtgctccgttgccgatgttggccttattaatcaggaggggagtgatgtagccagagagataccccatcagaccaccgacggagaactgcagtacgaaggtcacgaggatgcttgtccatgagccgtccgtaccccctgtgatgaactggatcagagcgatggtgagcatgtaggccatcgggtcattactaccactctcgagctcgaggatgggtcgtaggccttccttgaggtgcatattcttcgagcgcagcagggcgaagaccgaggcggagtcagtactcgacatcgtcgctgccagcagaagggcgatggggaaggtgaagtgtacgggcgcccagcccaagaggtccataccatagaagaagcccccgagacagagcgtcgtcaagatgacgcctaccgtagagagcatgatccccgggccgaggacggtgcgcatctccttgagcttcgtctcgaagcccccgaagaagaggatgaccgtcagggcgatcatcccgacgaactgcgtcttgttcgtgtcgttgtattggatcccgaggcccgcactgccgaagagcatccctgtgatgaggaagaggagcagggcaggcaccccaaagcgcgtgcccaccttaccggcgatgataccggcgagcatcaggaaggatcctacgaggagatacggttcgaaggctactggagcatgatccataggcgtatataatgggatgaggacgggagtgagtagagctgtgggtcatcggcctaaacaaagatacagaaatctcggcagtcttcggtcgcccgacccgcatagaagtcgctgtacatcagccctcgcccgagccttggtagctgataaaagccccgatctccgctcctctactgccgtcctcatcgcgtatgaagcaagcagagccccccgacggcatccgtaggacgctgtcggggggctctttcgtcgatagcttgctctgtggactgcttgattgagcggccttagagcggtatcatgaccttggcggggaagatgcgcttggggtcaccgaagcgtgcgatagcctcggccatcacccccttgttggggcgtagcacctccgagaagatgacccgcccattgtgcttgacgacgacgggcttagtgaagtccacatgatcgacatatagggtcagcgagccttgggctgtaccacgcaggagcttggtctccacgtcgaagctattgccctcatgccgtacgtcgaggtgcagacgggcatcgctgctgtgcttgatcccgccgaagccgaggtaatagaccccgtcagagaatccgtcgtcgatattgtagtaggtgtagcttagatgcttggggtacacgcgtcgcttgtgctccgagagccatggaggcatcgtcagataggggatggtgtgcccgtgaccagcgatgatattcgcctcgtggacgaagtcttctgtattagccttggcgagttcgctgagcttgtcgcgccagtccatcgcgttgaggatgcggtcgtactcatagtcacgctccccgacatcgaagcggaaggctacgttgcgcaggttctctgcgagctcgagactctcgatagcggcagccagagggccgaccgctgcgaagtagtcgggcatgaagagtccgaggcggaaggagccgtagcccccctccgatatgcccgtgaggtagactcggtcggggtctgcatcgcctcggagtacggcgagctggtaggcacggcggaaggcggtgcgctgtggagcgtagtgccatctgcccttgcggtcgtccgccatacgggggacgaagtagagggcggggctattggcatagcgatcagtgaaggacatgagggtgtaccactcctgctcgttgatctccgaagtccatggcccaggctccgcggggtagcgcccgccaccatggaggttgatgaagagcggatagccactggccggcttagctcctttggcgaagaggcggagctgcatctcttcgccttgggggatcttccagacgagagcgttgggggagttcagtgaccacggctgtgtggcgaggcggtcggcattggccttgcgccagagctcccatagctgctcctgcatcgctccgtagccctcggctgtgctgtactccttgtagcaggcctcgggggcttcttgtggggtagcgacatcgatctgctggcgcaggtagtctacgatagctgcgtcactcgtcgtggtggtcccgcgctgggtgccatcattcggctcactcttcgacttctccccgctacacccccatagtagtccgagggctatgatggggagtaggagggtggagagcttggggcggaggggtgaggtgtgtgctgtgcgcataggcggggtggtcgcttagtattcctcaaagcgactggccttgtcagcggaccactgccacttctcgaggaagctctcagtcttccccttggggacacggatgacgcacttacgctgtccgtcagcttcccacacgacggaggcaaaggggctcagtgtctggccgttcttacccttcggtagggcgggagcttcaccgaggaaggtaatgcgctcgagctgtacacattcggcgaaggcatcttcctggatctcggtcacagctgcggggatgtcgatgctcttgaggctcttgcagaagtagaagcaacgcgcggggatgaccttgatcttgctgggtagggtgatggactccatcttgttgttgttccagaaggcattggcgaggatgacctctaccgactcggggagcgtgatcttcttggctcgctcgttgaagagagcgccaccgaagatgcgcagcttgtccccagggaagatgatctcctcggcacgggtgtagctgaaccatccatcggctgtgcggcgtagcgtcgcgggagcgatgattttcttcaggctcttattgtccttgagtccgtactcatcatcaccgatgccgaaggctacacggctgatgtccagctcctcgagagccttcatttggtagcggatgaagtcgcagtcggcttggttgatagcgcccgaggtgaggagtaggatgcgcaccttcgagaggtctttgcccttgagagctgcctccaggccgccagcctgtggcacggcgatgcggacctcgccctcgcgtagagcagggagattctctttggggtcggcaggcgtaggtgtcacgggcgtgcctggcttcgtggtggctcccgtagagccgtcggtatgtgggtctttcttcccgtccgtcttctccgtcttgggggtgtcggtgctgcaggccgtgaatgccgcataggggaggagagctattgcgaagaggggaaggagcttcttgtggttcatatctgagttgttgtatggtggtaggtacgcccttctcacagcgctccctcatcccctcgcttagcttggggtgtggatgcaggctgtgagaagggcgcttgctgataggggatgctgcttattctgcctcgacgaagtacttagctacgcggcttttgggtgaccagttgagtgccttgaggtaggcgtccttcgtacccttcggtacggtgaacgtgggctcgatcgagtagtcgaattcctcaaaggcgttttcgtcaaggtcgttggtggtgaaggtaggagcggggcagaggaaggtgatctccttgagctgtgcacagcccgtgaagacgttgtccttgatctccgtcacgctcgtggggatggtgagcttcgtcagacgacggcagcccttgaaggcttcggtggggatgctcttgaggctggtggagagtgtgatgctctcgaagttgctattggcgaaggctgctgcaccgatctcctctacggagttgggcagggtgatgctcttgagcttctcgttgtacacggcaccaccgaagctcttgagcttattgcctgggaagatgatctctgtggctaaggtattggagaaccagtccttctgcgtcttctcgatatctgcaggggcggtgattttcttgagtgtgctattgccgtagaagcccttatcctcgtctccgagacggagggtggcagcgctcaggtcgatcgcttcgatcttgaggctcttggtcacgtagtctaagtcggcttggtttagggcgccagagcggacggtgagcttggtgagctgctccagatcttgacccttcagagctgcctccaagccccctggctgagcgacagctacgcgggcctcgcctggggctgctggctcttcgggttgtactacgggtgtcgtgggctgagcaggcttctgctcttgtcgtggggtctccttgtcgcaggagctaatcaatatccctgctgctacgaagcaggtgagggctgctaatctctgaaatttcatcacgtcagtggttaggatgggtgaattatgattggaggttgacaggggcttttgccctgaaaaacgccgcaaatatatgccctttcacaggattgaatttgggcggtaggtagcctcgcatatcgtcggtgtgatctggaaatcatctgtattatagtgcgttgtgtgagaatctgcgctgagctgtgctttgctgagaggtgaaatcacggagaaaaaatacataattgtaggtaggtttgcagtgcaaaataccgactttatcgcccgctcttatggtgctggggacgtgctttggagtagaggtgtgcgcttcggactcgtggagggaggatgtgcgaacctatattggtcggcgggctgacctatattgcttcgctgcgcgacctataggagactgttgcggtagagtcctgtcctctatttagagcgctaaggcatcgcacgcccagctccccgatatgcccctccgaagagatacgcaagcccttcgccttatcgcgcgtattcctcttatccagcggaggaaaaaacatcgttctcgtaaagaaaaaagcgccttcacgtagtggtattcttctatctatgcacgtagtcttaaagaccaggcacgcaaatccaaatatccacgtacgtagatattagagccacgtacgtagtccaaacttatctgccactcgtccgtaacttttatccctatgcggagcaacaacccaatataggtcacttcacaaagctatacggaatcagtccaaagctatatagctttcttcgtcatcctatatagctcgacccacgcacctatataggtcagcccgccgaccaatataggttcatttatcgacctcgggtggagcctgcgatggccttcgagggaagggagcgggtagcgggctgtaggagggggtgtccgacgtcaggggagcttctcttgaagaggaggtctgtgggtgagtgcctataataatgtacgcgcgcgaggctgtgaggaacgccgaagatggggagttatgcataccctcttcgcttgttgtggggatgtggtggggcgctgcctcccttattataggtagagtatggcaaagaatgtgtacttttgtacccaaataatttaactaaacaaatcatcaaatcacgtgttatgccgaacattatcacgataaagaagggcctcacgctgaatctgaagggaaaggccgctgagacgcaactcgcagcagcccagcgcacggagagctatgccgtcgtccccgatgattacatcggcttcgtccctaaagtgatcgttcacccaggcgacaaggtgctggcaggcgatgctctgctgtgccacaagggtgcgcctgagctgtgcttgacctcgcctgtcagtggcgaagtcatcgctgtcaatcgcggtgccaagcgcaaggtcctgagcgtcgaagtacgccccgatgcgacgacggagtacaagtccttcgccacggctggggtcgaaaagatgcagcgctctgaggtacttgctctcctcctggagagtggtatgttcagcttcttcaagcagcgtccctacgaccgtctggctaatcctctgactgagccccgtgacatcttcgtcacggcgaacttcaccgctccccttgctccccgcttcagctatctggctcagggtcacgaggacgagctacagctggctctcaccgctctcaccaagcttaccacgggtaaggtctacctcggtgtcgctcctggcgaactgacgggtgtgacgggtgtcgagcgcgtcgaagtccgcgggccacaccccgcaggtctggtcggtacgctgatcaaccacacggcgcctatcaacaaggaagagaccgtctggacgctcaaggccagcgatcttcttgtgatcggccgcttcctcaagaccggtaaggtcgacttctcccgcaccatcgctctcacgggctccgaagccaaggagacgggctatctgaccgtcctgcctggtgcccgcttcaccgaagccctcgcaggccgtctcggtaagaagggtgagcatgagcgcatcatcgagggggatgtcttctccggtatcaaggtcgatgaagagcacgaccgcatgagctactctattgaccagatcacgatcatccccgagggggacgacgtgcacgaggtctttggctgggctctgcctcgtctcaaccagtacagccacagccgctcttacttctcttggcttatgcctaagaaggagtatgtgctcgatgcccgtgtcaagggtggtcgccgagctatgatcatgagtggcgagtacgaccgtgtcttccctatggatatctatcctgagttcctcctgaagagcatcatcgccttcaacatcaacgatatggaggctcgcggtatctatgaggtggctcccgaagacttctctgtctgcgaattcgtcgacacgtccaagatacctctccagcagatcgtacgtcagggtctggatgagctgtacaaggaaatgaactaatagaaggtttcactcattaaaaggacaacgaccttgaacgcattaagaaaacaaatcgataagattaagcccgccttcacgaagggggggcgcttctcggccctggagtcagtcttcgacggctttgagacgttcctcttcgtccccaatacgacctcgaagcgtcgtggcgctcacgtccacgatgccatcgatagcaagcgcacgatgagcgtagtcatcttcgctctcctgcctgcgctgctcttcgggatgtacaacgtcgggctgcagcacaatatcgctgtaggtgtagaggcttccttctggagcaccttcttctatggcttcctctccgtgctgcctcagatcatcgtctcctacgctgtaggtctgggtattgaattcatcatcgcccagatgaagcatgaggagatccaggaagggttcctcgtcacggggattctcatcccgatgattatccctgtggagaccccactgtggatgatcgctgtcgctactgccttcgctgtagtcttcgctaaggaagtcttcggtggtacgggctacaacgtcttcaacgtagcgctgatcacgcgtgccttcctcttcttctcttaccccgccgctatgtctggtgacagcgtgtgggtacgcctcggctcgaccttcgggctcggtggtgctgagaaggctgtcgatggcttctctggtgctacgcccctcgggcagatcgctgctgctaagggtatgctccccgacatccacaatacgctcggtggtcctctcaccgactgggatgccttcctcggcttcctcccaggctcggtaggtgaagtctccacgctcgctatcctcatcggggcttgcatcctcatctatacgggtatcgccagctacaagatcatggtatctggtgtcgtcggtgtcttcgctatggctgctgtcttcaacgccatcggtgctacgcccgctatgcaggtatctgcacttcaccacctcatctatggtggcttcgccttcggtatcgtcttcatggctacggaccccgtgaccgctgcacgcaccgaagctgggaagtgggtctatggtttcctcatcggggtaatggtcgtcttcatccgtgtgctcaatgctgggtacgctgaaggtatgatgctcgctatcctcctgatgaacaccttcgcacctctcatcgactatatcgtggtagagcgcaatacgcagaagcgtctcaagcgtctctccgctaaggctcagaactaatccaacaccgctacaacgatgaatagagataagaattcttatgtactgatctatgctgcggtgatggtcatcctcgctgcagtcctcctggcaggtgcagcgatcgtcctgcgtcccgcacagcaggagaatgcgaacatcgacaagatgcagcagatcctccgcgcactcggtcagagccctgataagtccgccgtcatctccacctacaaggaccttatcaagaaggaactcctcgtcaacgaagagggccaggtcgtcaagaccttcgaaggggaagaagtcggtaagagtgacgctttcaatgccaacaccgagctctcctataagctcatcgctaagggtgagaagcaagacctccccgtctacgtcgctgaggtcaacgggaagaccctctacgtcctccccctcaatggtgcaggtctgtggaataagatctggggctacatcgctatcgatgctgctgaccactctacggtcgatggggctgacttcggcaacgctggggaaaccccaggtctcggtgctgaaatctccacgccacacttctctgcccagttcaagggtaagcacatcttccgtgaaggcgccttcaccggtatcgctgtcgtcaagaatggccagaaggtcgaggataaggactacgtcgatggtatctcgggcggtacgctcaccagcaatggtgtgaacgatatgctcgctgcctcgctcaagcccttccaaaaatttcttgaaacctataacgctcagtagccatgtctctctggaataaaaagaataaagaaacgctcctcgggccactcagcaagaacaaccccatcatggtgcagatgctcggtatctgctccgcgctggctgtaacctctaagctcgagcccgctatcgtcatggcactctctgtgacggtcgtcgtcgccttctccaacgtcgtcatctcgctcctgcgtaagacgatccctaaccgtatccgcatcatcgtgcagctcgtcgtggcagctaccctggtgaccatcgtcagcgaagtcctcaaggcttatgcttacgacgtcagcaagcagctctccgtcttcgtcgggctgatcatcacgaactgtatcctcatgggtcgactcgaagccttcgctctgggtaacggtccttgggaatccttcctcgatggtatcgggaacggtcttggctacggtgctgtcctcgtcgctgtaggcttcttccgtgagctcctcggctctggtacgctcctcggcttccagatcatccctcagagcttctacgctaccgatggtatccacggctatgtcaacaacggtctgatgatcctgcctcctatggcacttatctccgtggctgtgctcatctggatccaccgctcgtacaacaaggagcttcaggaaaactaacctttacccacgcaaataagaactaacaaagaatggattcattagccttattctttaggtcgatcttcatcgataacatgatcttcgcctactacctggggatgtgctccttcctggcagtatcgaagaacgtaaagacctcctttggcctgggtatcgctgtcacgtttatcctgacctgtacgctgcctatcaactacctccttgagaccaaggtcttcaagcagggggcgcttgattggctcctcggtgctgatgccgcaggtgtagatctctccttcctctccttcatcatcttcatcgccgtcatcgccgctttcacgcagcttgtggagatgctcgtcgagcgcttcagcccctcgctctacgcttcgctcgggatcttcctcccgctgatagctgtgaactgtgctatcctcggtggatcactcttcatgcagcagcgtgaattccccaccatcggtgaagctaccatctacggcctcggctccggtatcggctggatgctcgctatcgtcgggatggctgctatccgtgagaagctccagtactctgatgtgcccaagcccctgcgtggcctcgggatcaccttcatcgtcacggcgctcatggggattgccttcctcagcttctctggtgtcaagatgtaacgaaagcgaagactcaacgaaatgaatacaaccattatactcgtcagtgtgggcatcttcctcgtggtcacactgctcctggtgatcgtcctgcttgtcgctaagagcaagctcgtcccatcaggcaacgtcaagctcaccatcaatggggagaaggaagcagaagtacccatcggtggtacgctgctgagcactctgcagggtgagaatatctacctctcctccgcttgcggtggtagcggttcgtgcggtcagtgccgctgccgtgtcgtcgaaggtggtggggaaatcctgcctacggagacgggcttcttctctcgcaaggagcagaaggaacactggcgtctggcttgccagaccaaggtcaaggaagacatgcaggtcatcgtacctgagtccgtcttcggcgtcaaggagtgggagtgcgaagtcgtctcaaaccgcaacgtctcgaccttcatcaaggaattcgtcgtgaagctccccgagggtgaagtgatgaacttccagagcggtagctacgcacagatcaccatccctccctatgatatcaagtatgccgactacgacatcgatgagaagttccgtggcgactgggatcacttcgatatgtggagcctgacctgtaagaatgatacggagactatccgtgcttactcgatggctaactaccctgccgaagggaacatcatcacgctcaacgtccgtatcgctacgcctcctatggaccgcgctacgcacaagtggctccccgtctctcctggtatctcctcgtcctacatcttctcgctgaagcctggggacaaggtccgcatgagcggtccttatggggacttccacatccaggacacggatgctgagatgctctacatcggtggtggtgctggtatggctcctctgcgtgctcagatcctccacctcttccgcacgctccacacgggccgtaaggtctcttactggtacggtgcacgaagcaagaaggagatcttctacgaagaggacttccgcgagatcgagaagcagttccccaacttcagcttccacatcgcgctctctgacccccagcccgaagacaactggaccggctacgtcggcttcatccatcaggtcatctacgacaactatctgaaggatcacgatgcgcccgaagatatcgagtactacatgtgcggtcctggtcctatggccaacgccgtgaaggtgatgctcgaagacctcggcgtaccgcgtagccagctcttcttcgacgacttcggcggatagtacaccgctcgccttgcctccttcgggtggctggcgaagtccaatacaaagccaccccaccgttagctccgtgctgacggtggggtggctctttttgtgggtagcccgaggaggccagagcgtaagggggaaggcgccgagctttgatgtcttgccttccaaccaataaaccttaccttcgtagctgaatttaatagcaaagcttataagtatgattgcaacactgattacaggagccctggccggatggctgggcgggattatctatcgaggtagtggcctcggacttctcgggaatatcgtcgtaggtatcctagggagtggcgtagggtcgtggcttttggagaaggtcttcaatacctctctgggcgaaggctggattggctcgattgtgacgggagccatcggcgctatcgtcatcctattcgtaatgaatctgctagtcaagcagaagaaatagggacggacgcccgtatataaggcgctgaattttcgcatatgcagaaataaatttctgcatatacgaaaaaatatttccgtatatacggagattcccctgcgtatatacgctgcttcctctccctctatttgggcgtcttgtagcccagctacgaggctcctctccaatagacaagcccccgagtaagctcacttgcttactcgggggcttgtgctttatttgagtgcctcagagggaggcgggggagtcgttacttgatctcgcaggcaccaccagcgcaggaggctgcaccaagctcatcggcattggtgaactgcttgccagagaagtcgacgctcttccagtcaacgggcttgtacgtcttcttcaggacctcgaagaggtggaggttattgacgctcttcagcacgttcaccgccttgtagatgtcgccacggtagtagttgtgggcgaacttctcgatacggcggacgatatcgcgcttagcagcgaggttctcgaccttgtcctgcaggcgtgctgagaggatgccacgcacgtgctcacggtccaggcagggggcttcgccctcgacgctgtgacgctggatgtagtcatcgatagcgtagtccgagacgaagagctgctcgccacggccctgagccgattcgcaagccttccacaggtcgccgaagacctcgatcgtgtccacgacgagccccgaagcgaacatactaccgacgccgtattcgcggaggatctcctcagccgtcgagaccttgcacataggagcctgaggcaggtccatatcgccgtaggtcgagaggaaggtcacgccagcgatgtggtcttggttctcccagacccagtcgcagacggcatcccactggtcgttgggcacgtcgacggtgttcgatacattattcttgatgggagactccatgtcgctcatgccagggatgacccagctctgctggacgagcttgacgtactcgaggagcttgacgccactgagttcgctgcgcagaagagtgtcttcgctttcttcgatggggaagaagatcttcttgtccgtagcgggcttgaagatgttgggctgtacagccttggggttagcctcttcgtaagccttgaggttgggctcttcgatgttggcctcgacgctacgcaggtagcgcttagcgtaagcgccgtggatacccgaggtcataccgagcaggaggctcaccgtaccgtcaggcttgacgcaggtcgtacggctggcggggttgatgccgaggatgcgagcacactgagagttctgctggcgtacctgcatagccccgacggcgaggatatccttgttcgtgaggatctgagggttgttcatgatcccaccaatagatacaccgatgagggggtctgactggatgatattcgtcgtagcctgtccgaggtaggggaagtccatgtaggtagcctgcacggtagcgagcgtagacgcgcagcggcagatcttgtagaactcctcttcgctcgtacattccatcccattgatggaggcaaggttacatacctgccagcccgtatcgccattcttgtccgtggggaagaagccgatttcgcagcaggggttacagccgacgccgaacttatctctccagtagagaccggggtcaccgctcgtgcgcatcgcctggaagagcgactcatagagtgagcgatcgacttcgccgcggttgagagcggccgacatgttgaagcgagcacgctggggattggtagagaaccagtcgccgtgcttacagttcaccatctccgtgtcttcgggagagaagaggatcatcagcgccgagcgacggacaccacccgagaggacggagtctgccaggtgagcgatgatgtcggtgcactgcagggcagagaggcgcttctgaccagctgcgacggcagcattcatcagggcacggatcttatcgagtgccatacgcagaccgtcaggtccaggagcgatgaagcgcttagcgatcttagcacccttggggcggatctcagagtagtcgaagacgggcttcttgacgccagggatgaagtagtattcgagaaggcggtggatggagtcagcccagccctcgatgctgtcaccgatgacataggcttcgctttcctgagacagctcgctggcggggaggagcgcagggagcttgtctacgtgagcctgctctacggagagaccgcagccgcagccactgagcaggagccactcgatctcacggaagacctcaaggcggtcacagtgcgagtagctacagttataggatttcgctgaggacttcaggacgggctcaccgccgaactggaggttgcgctgggacccaacgaacttcttcagcctgtagtagtcgatggcctcattgaactgggtcatgaaccactcgtcttgcagcgcctggggggcgaagcgctccaggtgcgtcaggtgcatctggcggatacgttcgacgctctcgtcccaggtctctttacgacccaagtcttcgcggaacaaggaatacttactttggtaaacgtattcagataaagcgcgtttgctctctgtcatgatggttgttgaaaatgtgatatttacgagtggactcccgaagcaatccaatcaaattttgtacaaagctacgaaaacaaaaccgcactttcccctaaaggttcagcccaaaatcgcaccgctttatccctcagcgagatacatttttttcgccccttttccccctcttttctccctctcgggcacccccgaggagggatggaattgcccctttccttcccccgaaatctcaccctcacctgctacaatgcacccctttcccgcctccctcgactatacattatatatagaggttgttgctctgcgtagggataaaagttgcggacgagtggcagataagtttgggctacgtacgtggatctaacatctacgtacgtggatatttgggtttacgtgcctggtctttaagactacgtacatagacagaggaaaactactacgtgatggcgctttttccttcacgagaacgatgcttttccatccgctggataagaggaatacgtgcgataaggcgaagggaaaagcgtatcacttcggaggggcatattggggagtggggtgtgcgaacctatataggtcgctgctccgaccaatataggttgacgtgacgaccagtatagctccgcgtcgtgacctatatagattcacccgctgaccaatataggtcggtagcacccctcctgagaaggggatgttagaagcctatggtcatgctgccgattattctcatctttacgctaccaaatcacgccgaggacatcgcttcctgccggctaataaagagtgaatagacaatgatgaatagcatactatatagagtgcgacttgtggggctcttcctgcttgcggtgggtggaagctacggcacgtcacaggcgcaagaggattatcgcatgttcgaggctaagacgcctcagttagactccgcctatgccaagggcgtgtcggggcatatagcgggagaactacgtccaggactacttgtgatggctggtgggtgtaacttccccgaccgcccagcacgaaagggtggagcaaagcgctactattcagagatctatatcggcgagtatcttggcgcagtgcatcatgcttgtgagacaaaggcttcggaagtagatatatggtggtggctcatagggcatttgccccaaccgacggcctatgcggccttccagcagtatgatgatcagctcatcgtcgcaggtgggcagtctgctgagggagacctacgtgatgcctatatcattcagctgggcaatcgccatggtatgacgatcactccgctccccagcttgccagagcctcgtagtgggatggcttcagcgcttatagagaatgtgctctacctcatcgggggtcgtgtgaacgggaagctctccaataccgtcctgtctctcgacctcagccgtccgcaaaaggagtggcgtgaggagacgccttatccgcatagccctttcctcaagctcgtagctatgacgaatcaggatgaaagcgatacttcttccggcgtcccgtacttaagtgttatgggatcattcacaggtgtagatgagcccgatcaacgagtccaggccgatgtcacctatatgacttatacacctcagacgaagcagtggcagacttacaagatcgcacccgatgaccccatcgctgcccatggctttgggggtggttatgcttcggggggcgaggccagcttctccggtggggtgcgggctgatctctttgtgacggcactccagcgagagaaggatctgaaggctgcgaaagctaagggcaatcgtcgtctggtgaagaagctgcaggcagagcatcgtgcttatctcggccatgatcctgcatggtatggtttctgcagcgactggtactccttcgataggtcgagagggaggggggaagcgaaaagcggatttcacttcgatggtcgagcagatgccgtctatctggataggtcttcttcgatgatggatggtatgctcatcggaggggagacgatgcctggtgtgcgtactcccagtatcgtcatctttacgacagcctgcgatccacggaaattttatgtgacgaccgacccgaattaccagtagggtgactcgggctctcccagtgaatcaccaatagccagcaaagaaggcatatagcaaggcgatattaaataagtgtccccacctgtagctgagactacgggtggggacgcttctttatgggtgcttatgccccactgtgcccttagctgagggcgtaggttagcgcctagtatgggttggcggattcgagctcatctaggcttcaagcttagcctttgcccgaggcttgagccaagggatggtttggaaacccatggtgggtcgtaaaaggggtactaaaggggtgacctttctcccagtgaaacgcctcaagattcctcgcccaaaccatcctcccccaatacgtatacgtttcgtgcctgaaacgtatacgtattgatcacggagggtataccctttgcccgccagacttattcttcctagctttgcacatcgtcaaactcaatacaaatagatctcatgaaaatcgaaatcggagagtccctagccttgagctacctcaagcacgtgaagagatgcgtggtctatcagactaattggaaactatcaagctggtggttgcaggagttagggaaggagtctccagcagaagaactctatgaagaattaaaaggatcttcaagcaaagagaaaatagcagtaacagattttgatgttaaggatgtcttgacatctgactttagtcagttcttaaagcaggctgagatcgatgcactaggagttgataaagacgggaacgtatatgccatagatgttgcctttcatgagagagggctggggtatggtaaaaaagtcaatgcacgagatcgtgtgatgaagaaatttgtgcggtcttatatgataatgctgggctgcttcccaggtcgaaaatgcacaatcatttttgcctctcccaaagtggataaggcaaagaatgatttgattaaaccagcctttgatgcgttgagtagcgatgaaagatttaaggataaagagattacgttcgaatacattgtcaataagaagtttgagactgatatcttgactcccactattgaggcaagtaagaatgacgcagatacaagtgagctattcttaagagcatacaaacttctccatatgccctatgttgatctcaacccagaggcaacggagacggaggtcaatgagctcgtctctcttcaagtttgaccttaaaataaaatatagaagcgtccccacctgtagccgaggctacgggtggggacgatacttttatataggcttatgggcggagagccttagcccaagctgtaggtgtggacgctggcaccttgggcggagggtaggtagttgataccccaccagcacatctgcaggaggatgaacgagatgaagagcccccagagcgcagcacggcggtagcggtccgaacggatgcgcacgtggatataagccagataggcgaaccatgtagcggcagcccaagtctccttggggtcccacgcccagtagtgcccccaggcttccttcgcccagagcgccccgaagagaataccgacagtcataaacgcccagccgacctgcacgaggttgtcgcagatatccatctcgtgatcgttgatgggtgacttcttgaaccacagtaggtaggccgacatcagtgcagcggcacccagcacggcgtaggcgaacatatagacgatgacgtgcggagcgaaccatgggctctgcagcgctggcatgagcgtcttgttatggatgtcggggttgacgatattgatcgtggtgaagacgcctgccaggacggtgctgaaagcaaggatccaagggtagcgccagcgcgaatagacgatcagccccgccgtggggaggaagaaggcgtaccacaggcgggtctcacccatcgtgcgaaggggcgggcgctccagcgacatccacagcccgaggatgaaggcgaagtaaacgagcagccctgcagcggtgaggagataggtcggtagcggacgctttttccaagccgtccaagcaccacccgcccacaggaggagggcagggatagcgaagaatatgaaggaatcccaagtcataaggatagagttgatagggttggggtgaagaagcagaaggggtaggggagcttgtccgtgagccattggagcggtgcgcgcttggggtaaggactttccctacactcaggtcgccttgcttagcggcggcgcttctgtgctgtgatgaaggtgaggatagcgccagccaagagtagatagatgcccacatagacggcggggagccaagggtccttgacgagctcgaaggtgctggtctcgctccagcgacccatcgcttcatcatagctgagctggtagatcttccatccgtcgaccgtcacgggcttgttgacctcgacggtggcgacgatgttcttctgcgtctgcgtatagatatggatgcgtgaggcgtagcgctcgggttcgcggcgtgccatcacgaggctcaggtccttcgtgagcttcagctcttggaaggggaagaggtagctaccacaggtgacccatccgatgatgggcttgcccacttccttgccattcttcatcggttgggcctcgacgaggagtgccgtcacagcgcccgatgacccccactccacgtacttcgtcgtgtcgtccgccatgacgggagctgcgaggggatagttcttgtgtacacggatgcgccactgcgacagcatgccttcatggaagtgcttatcgataaggacgatctgtgggttcttctctggtatggacttcccagtcttactattgatgaggaggagcttgggggggtattcgtcgatggtgaacttctccagctggatggccagcggtagctccatgaagccctgatcgtgggtggcacgccactcgggcatgtcggtggtggccttgagcttcacgcgctccatatcggcactgccgagcgtcgcagcgacgatggcgatgaagagtccgatgtgggagagcagcgaagggacctctctcaggcggaagtgtaagatctgccgtatcgcgatgagccccacgataccagcgaggcgggcatagatgagcacgaagggccagaaggacagcattcgtgtgagcccaatggggtcaatggctcgctcgtgaggggctacctgacgggtgagccccatggctacggtgagtatagctgcgtagatgagtgtggggacagccgcctcgacagtgaagaggtaggagaagaggcggacccgatgacgtagcgcgtagatgatgacgagcaggaggaggtagaaagtaaggacgatggcattcaccgggaaggcgaaggctgaccagtcgatcgggcctgccgtgtactgcagcagtagcccaacgaggatcaggcctgcaccagtgacgaagccttctctcattttccagagtgcgttgaacatagacggggaagcggttggggttatatcgaaagcgcggcggcagacgatgaggtctgtcgccgcgctgaagtagggatacttagatgtgtgtcagggcaacaggctcggcttagagctcgatgagcttgccttgtgccttagccgactgcacccacttaggtacgacggtcttcatgaactctgccttatcagcctggagcttcttgccgtcgacgccgatgtaagcccaagccttttcctttgtggagatgtcaggcatggggacgtcacctgagaagccgtggcgtgccagcaccttggcgatggcaaggcgagcttcctgagcatagccgaggctctgaccgaggatacgcgtcacttcctgtggtgcgtggaaggaagcaccgtggctggcgacagcgaagtcccagcgccactggctcttgcggatggcctgcagagcatccttcatctcggcttcggtagcaccgttgtcccaagcgtacttagcttcgatgtgggccttagcgagctccttctctacgcggttgcgcacgtcgttggccatgcgctgacgttcgtagacgttctgacggagcgtctcggcatcctcgcggtggcaggtctgacaggtcttatcgatcttcgccagagggctggtgatctggtggtcagagtacttcactccaccttcgctcacgtagggcatgtggcagtctgcgcacgatacgccgcgctggccgtggatacccatacgccacagctcgtagtcggggtgctgagccttgaggatgggagcacgagagatcttgtgcgtatagtcggagtagttcatctcgtcgtagtaagcctctatgtcctcgaccgtgaagcccttgtcgtgggggaaggtgaggtacttgccatcgcccttgaagtagtactcggtgtggcactgggcacagacgagggagcgcatgtgctggtgggactgcttggagacatcttcgccacgacgctcaaaggcttcgtagagggcggggcgtgcgggcttgagcttcatggtgcgggcatcgtgacagtcggagcagccgatggtgttcacgatctcgggtccccactggctccagggagccttgtagaactcggcgatacccttctccttcatgatgcggggtacgtcggggctcttacacgtccagcaggtaccaggctggatatccttgttgccgttcacgccaggggagccggtacgaaggatctcgtccatgtcttcgatagcgtgcttgtgtccacgaggcgtgttgtactccatagagaaggagtagccagcccatagcacgaccatctcggggcgggcagcgagcacgtcgacacgctgcgagctattgaattcgccttggtaggtggtgtcggcggtcttgagccacgtctgatattcacgggggaagtcttcggcgaacagctcgttctgtgccacgatagcgtccttgaagatgtgcttgcggttgttgtagatgctcaccacctcggcgcggcgctccaggagtgaggagacgacgagtccgaggacgaagactacgaccatagagcctccgaataggagccatccctgccaacgttttaattgttgtgccatgattttgagtctcttttatttgttattctgatattatgcttgcgtggtgaggatgcttagttcagcatcttctgcagccagtcgggcactggcgagtcgggcaggggtacttcggcccctggggtcgaggagagggagttcatcctgccgtgggccacgtcgcggtggcaatcccagcaggctttcccttcgtcgcacttggcgtccatgtaggtgatgcgccccgtgttgacaagctcggtattgagggtggcgtggcagcgcacgcagttttccatgattacctcagcgctctcgtcgatggcttggatggcctgacgctcttggcgcgtgacgaacttgtagacgtggttcataccgtccttccccttgaagaagtatttgcggaagacgttgtcgtgcggtacgtggcagtcgttgcacgtggtgttgcgggcgtgggcgccgtgcatccacgtggcgtagtaaggagtcatgatgtggcagttgacacaggccgaggggtcgtctcctaagtaggtgtggaacctaagcagatagaggaagagcccacctaaacccaccacaacgccacacacgagcagcatggccaccttggcgcggtagctcaagcgcggtagtcgttggaggaatcggttcattatcatgaggtctaagtgatgaatacgtcataaatataatcaacttttctttcctcctacagccaatttctttagctttttaaggaagctactgcgttggtattctgcgccgttaaggtgtttgaaaggcgtgttcttctattggtgataaatgggaggggaagtgtgaaggcttactctgtgatatccaggctacgctggcttatcggtaaaggctcaatttgatagatttttggaataggtgagtagaaatttccctttgctttgaactattcagaagagcgagtgttccctatatatttaatattaagtatgaacatgaaaaaaacaagtactcttcatggtgtctattcaagataccagagtcagatgaatgtcttccagtcgcgtatcaatgctggaatggaggatgagtttagggagctttttgatcggagcgaggaagaccttcgcctccttctagaagttctatattatggtggacgttggatctatgctgactcaagcctagacctgacaaagctttctcatgaagaggtgcgggaggagttctataagttcagtgatcagttcttggctggtcaagggttatcttttggaatgccactaagtggtgctcatcttcatgtcagagattgccagtcttcagcttggaagaactttattcttcctgcgatagaccttctataggtgtgatatgaggaggacagggagttgagtttacttgtaaagcatctccgaacttctcgtacctttcctcaaaggttaatgaattatatagccgaagcgacatcgtcgcttcggctatgatgctttttttggggggggggatggaggaagtggcgcctgtctacaagaaaagctatctcggtgtacaggcaagtaaaagcacctataagtcaaacttcttggggctttctttatggtcaacttcccttaggtcgaaatccatctctatgggagggcagtgtgaacctatattggtcggcgggctgacctatataggttcgtgggtagagctatataggatggtgaagaaagctatgtagctttggattgattcctatatagctttgtaaagtgacttctattagtttgttgctccgagtagggataaaagttgtggacgagtggcagaaaagtttggactacgtacgtagctctaatatctacgtacgtggatatttggatttacgtacctggtctttaagactacgtacatagacagaggaaaaccactacgagaaggcgcttttttcttcacgagaaggacacttttccctccgcaggataagaggagtacgtgcgataaagtgaagggcttgcgtatcacttcggagaggcatatcggagagctgggcgtgtgatgccgagaagcattgcgtcgggtggctcgctgtatgggggaggcatttgctccgctccattattatcgtacttttacggggaacaaaacttaccgtttatgaagagcagatataatagattctttgtcggggcaatcgtcctcgttgtcgttggcttcctcacgggctgtgcaatgccacgtgtcccgactgtccaggtgaataaggaccttcgggcctacaactacgtctacatcccagcgacccaaccagtacaggagacttcggagcaaaagatcgagtcggtcaatccccgcgatctgatcgctggagcctttgccaagaaaggctttattatcttgcccagcgtggatgagcgctttagagccaagaccctgatggtgggctatgggcacggtagagggcgtagcgtcacgttgagagaggtgaccatccagttggtgtcggctgagacgggcgaattggtagcgactgtgacctctgaggggttgggcgttacggaggtcgacaaggtcgaagccgccatcacgagagccttgaaggcgctgctcaaatagtccagctgtaataaggccttcgggcctcttgaccaaataaaaagcgaatcgctgcaggagtatttcctacagcgattcgcttttttgtggggcgtcgttggctacttgaggcgggcagcgatcttgtcgccgaggacgcggatggctaagcgtgcgaagagatagtacttggcgcacttggcgtagagggggcggtcgggtgtcacgatgatcggggtgtaggccttgttgtagttggccttgagcgccttcttgtggccgtagacacctgccgtatcaaagatggagtagcgcaggccgatctcttggggcttgtcgagcatgcggtagtctttcccctcgacgagcgtggggcgcatggcttcgatgaccttggtgtacatgacggggccggtcgtgcgcaggacgccccacagacccgctccgtggcggaagggcgtgtattcgtcgatgttgcgcagcatctgcaggatgacggcacgcaggaaggggtgacctgctacggaggcaatgcaccactggatgtattcgccacgaggaagggtgcccagctcggggtagatgccgatgccttcgtactgctcgccggggcggttgtcccaatgcgtcaggatgaattggtcttctgggcgaaggacgtccttgaggggcttgtccaaggaggacttgatgtcaatgtacacgccccccagctggtagacgaggaggtagcggaagaagtcggcacgggcggcaccatagatcggtgcgatgcgctggtaatagccccagatgacttcgccgtaatgctcgaggatgaaggccttgatgtcttcgtcgtcgaagaggtgatattcgtattcggggttcaagcgcttgatgtgctcgatgttctgctcgatctcgtgaggtagcccggtcttcgcccgataggtctggaagatgtgtcggctgatctccttgcccaatgccttctccggcactaattcctgataattgatgctcatcgctcctgtttaactttatcgccgccagccaaatcgcagctcatcggcgtctctgcaaaggtagtgaaaaggccagggagtggggggctggggaagagccctaagccaaaggcttagttgcggtagggctttccgtctctcgtgatactccctcatgagggtatgccgacccagcggatgtctgactgatctgatgcagagaccttagtcttatcgttggtgaaaggctctttggtaatgtggtgtagccataaaagaaaagtgccgtaacctcattagttacgacactcactgcggagagagagggattcgaacccccggaacctctcagttcaacggttttcaagaccgccgcaatcgaccactctgccatctctccatggtcaattttaccccatctaaagcccatccgcaagggagggtagggggcttaaccgatgcaaagatagtctatttcggtgaatttgcaagagcggacttatcggagagggcaatgtctccctcgtgaggcggggagagaggggcgagtcgtggatgtcgccgccacgcctgctcgctggggaagttgtacctttgtaagaagaccgcgggactgcggtcatagcacaccgcctaatacattatatatatgaataagttcaagggcttcctctacgggatgactgcatctgcgaccttcgggctgctgcctctcttcacgcttccgacgatggccgagggcatgacgacggatagcatcctctgctatcgtatgctcttcgcttcgctgctggtggccgtgttgatgatggtgcgtcgggtgaacttctccgtgggcttgcgcgagctgagttggctcgtcctcttgggcttcttctactatgggtcggctactctgctcttccaggcctatgggagtatgtcgagcgggatggccacgacgctgcacttcctctatccggtgggcgtgacgctcattatggcggtactcttcaagcagcgtccttcgcccttcacgattatcgctattgtccttgcgctctcgggtgtggcactgctctcgctgcgaggtagcgggggagcggaaggaagcgcttcgctggtaggcatcctgctggtcctgctctcggggctcagctatgcgatctatcttgtgacggtgaataatgtccgccgcatccgcgagatggacaatctgaagctgacgctctacgtcctcctatccagtgcgggcttcttcctcatcaatgcatccttcaatggcggggtgcaagctatccccagcggggcggcactggtcaacctcctgctgctggccttcctccctacgctggtgtcaaatcttgcgctcgtgcgggcgatcaagagtattggctcgacactgacctcggtcctcggggctatggagccgctgacggctattgtcatcggggtgatagtcttcggcgaaacgatttcgggtacgatggctctggggattctcctcattatcgcagcggtgacgatcatcgtactttcgcccctccttgataagaatatcgccgagcgcctgcgccgttttgcccagcgacccattgggcggaggtagatcgggcgaagggacttgcttcctgctttatctctcctattaccaaggtgttccttgtgatgaagggctctcctaagggagggccctttgtcgtttgcgtgggagcagggaaaatgaaccagtactggtcgactcagcgaccagtactggttgccaatagtgaccagtactacttcgcgtcgtgaccagtactcctccgatcgatgaccagtactggttgattttttccctcttccgaggagggtaatttgccttcgtaggagaggggcgtgggaggtacgaaatagggggcttcgatgtaaccgactttatggtctattcgtattgtctaaggcgggagatttggtgaattcaaaacatatctcttaatttgtagtcgagagatgtggcaaaaaacgctcatctccacgcacaaatttcattcattacgtagcaataaatagtcgcctattgagcaagctttacatatctgaaagtaattaagtctatcgctggtccgtagccagagtctgccccgacgtcttgtgggcgcgccctgtggatccagccctaaactgagacgacaatgagacgatatgaaagcatgagcgatgatcagctggtgcacctttattccgctgggactaacgaagcctttgacacgcttctccttcgctacgatgcctatgtccatacgacgatccgctattgggtcactgacgaagatctcgtggaagatatcttccaggataccttcatcaaggttatgatgaccattcgccaaggccgctacacggctgaggggaagttccgcagctggatcggacgcatcgcgcacaacctgattatggaccacttccgccgtcagcgcacgcgtggtcaagagcagacgatcgaggggacttcgaccgaagatctcctgcagacgatccagatccccgcacccgacgctatcgcagaggagcgcctgatccacggcgaatatgtcgatgagctgggctacggcctgagccaactctctgccgagcagcaggaggtcgtgcgccttcgctactgggaagagaagagcttcaaggagatcgccgaagagacaggcgtcagcatcaatacggccctcgggcgtatgcgttacgctctgcagcatctgcgccgctacgtgcgtcagtaagcctcccgccctcttgtgcggtgggacgataccatataatatatatgtcccttcgcagccttacacttgccttcgcgctcctgctctccgtcctttgccccgcctcgctgtgggcgcaagagggagccgtcgagcgtcagccctatctcgacctacgccgctattacattggcttccgcctcgggcttcacttgcccgatgtgcggatcaccaatagcggggcggtcaatagtctgggcggacaactctgggccgatagccccgtgtggcacccaggcttcagtatcggcgtcatcgggggcatgacgctcgtgcctcagctggagctacgcctgctcccgacgcttcatctcggggatgtgcccgtggcctacactgatgggagccaagaggtagagcgtctctctctgcgcacgagtagcctgcagctacccctggagctgaagtgggcagccgtgcgctggggcaattaccgccccttcgtcgctgctggtggttatgctgccctgcagctcgggacgcgctcgagcgaactcctgcacctcctccccatagactacgggctgagtatcagcgctgggtgcgacctctacttctccttcttcaagctctcgcctcagctgaccttccactacggcttggcgaaccttcaccaaacgcaccgccccgatctgcagggcgacccacggatacgcttcactgaggccgttcgtgggatggcgacacgtgcgcttctcttcacgctctccttcgagtaaaatggtcttttaaatagttttaactatctttgcgacaaatagcctcttctcagagggatcatattaaacgattcaagacattatgaaaagatttgctcttatattctcagcactccttctctgcatcggcttcgtcgtcgcacagagcggtaagggtgccgtcatttcttccgctgcgccagagtttgacttcggcatcatcaaggaagctaatggtaaggtctcacataccttcgtcatcaagaatgtcggggacgctcccctggtgatcacgcgtgtcgctacgccttgcgcttgcacgacgcctgagtacagccaggagcctatcgctccaggtcgcgaaggcaagatcactgtctccttcaaccccgcaggccgtcccggtcccttcttcaagaatgtcgccgtctatagcaacggccgcgatggggccttcaccctgcgtatcaagggtaaggtcgagtaacttcacccgacccgatcacgactaagacgaagccgctacagcatctctgctgtggcggcttcgctcttttatagacctgctctatgggccgatgtgctcacttttatagtggtagtaggcacagatatgggtaaatggttgtacctttgtattataaattcttttaggaaatgagtagtatcccctttgatctgtcgaagatccgcgccttcgtcctggatatggacggggtagtgagtgctacggtgagccctattggccccgatggtatgcccatgcgtacggtcaatgtcaaggacggctatgcgatgcagtacgctgtcaagcagggctatacgctggcagtcatctccggtggtgcgagcgaagcgatgacgcagcgcttccaccagctcggtgctaagcacgtctatatgcgggtctcggacaaggctgctcagctcgatatcctctgccaagaagcggggattacacccgaccagatcgcctatatcggcgatgatatccccgacatccccattatgaagctcgtggctctgccctgcgctcctgcggatgccgcacccgaagtcaagtccatagctacctacatctccctctgtgatgggggctatggtgtggtgcgtgacgtcatcgagcagaccctgcgtgccaatggccagtggtcgctctcagcaggctttggctggtaaggagaccgaatactatgtggaagcacctcgacgactaccagatcatcttaggctcacagtctccgcgccgtgtggagctcctgcgtgggctggatcttccctttgagcagatccgtctggagggtgtcgatgagtcttaccctactgacctgcctctcgatgagatccccctctatatcgcccgcgtgaaggcggaggcttatcgcccacttctcggtgagcgcacgctcctcatcacggctgacacgctggtcttcatcggggataaagtcctcggtaagccccgtgatgctgcggaggcgaaggcgatgcttcgcgagctaagcgggcagaagcataccgtcactacgggtgtcgtactgatgacggccgagcactcggtggcattctccgacacggcgacggtggagttcctccccctgacggacgaggagattgactactacgtcacacgctaccagcccctggataaggctggtgcctacggtatacaggagtggatcggctaccgtgccatccgccgtatcgagggctctttctacacggtaatgggcttgccagtgcatctggtgggcgaacaattgatgagcatatttcaaacaaatacatccaatagataatgtatatacagatcgtaggcgggcgcatttacacgcccacaggctggatcgatggtggcagtgtcctcgtcgaaggcaagaagatcaaagcgattcttaataccgacctccctatcgagggcgcacgtcagctggatgctcgaggctcgtacatcatccctggtgggatcgagatgcacgtgcacggcgctgccggagcagactatatggacgggacggtagaggccttccgcacagcatcagactaccacctccagcagggtacgacgacgatcttccccacactctccacctcgagctatgagacgatcatgaaggggatcgagtgcacggagatcctgatgaaggacgatgagtccactgtcgaaggtctccacctcgaaggtccttacttctctgtgaagatggctggtgctcagctccccgagctgatccgccccgctcgtcccgaggaatacacgaagatcatggagcgtggtgacggtgtcatcaagcgctgggacgctgctcccgagatcgagggtgcactggacttcggtagctacatccgtgatcgtggtgtcgtcgtcgcactggcacataccgaggccaacgacaagcacgtccgcgcagcttgggaacatggctacacgctcggtacgcacttctacaatgcgatgaaggtcgcacataaggtcggtgtctacaaggaacccggtgccgtagagaccatcctcgatatgcctgacttcgatatcgaggtcatctgcgatggtatccacgtgcctcccgtgatggtccacctggcttacgctgtgaagggccgcgaacgtatggctctcaccaccgatgcgctcctctacacgggtacggtgaacttcaaggatcccacggggcatgctatcgtcgaggacggcgtctgcaagctcagcgaccgctcggctctcgctggtagtatcgctacgatggacctcctcatccgcaccgccgtgcagaaggctaatatcccgctcatcgatgctatctacatgtgctcctacacgcctgcccgcattatgggtattcaggatacgaagggtgctctcgaggcagaccacgacgcagatatcctcttcctcgacgaagacctccagctgcgcttcgtcatgcaccgtggtcgcacggtccgtggcgccgagttctggggctaagccttccgactccgatagatacaaacacgcagcgccccgtgccgtattggcacggggcgctgcgtgttttatgtttgtccctatcgctcccgtggctatgccagcaggcgagcgaggatatagccaccgccgacgagccagacatacagcccgagggcgaggaggaaggccttagcacctgactggcggaacttggcaaaggtcgcatccaagccaatcgccgtcatcgccatcgccagcatgaagccgtcgatgacctcgatgatatgcgtcagctggtgatatgctgcgacttggccgatatgctcagctcccatacccagcagcgtattgatcccgatagcgatgaggaagtagaaggcgaaccaaggtacttgtatcttccccgaggtagcgttgtcagcacttcctcggcgcatgatgtagccgaggatcatcaggacgggtgcgagcatgaggacacggagcatcttcgtcatcgtcgcgatgcctgcgatgtctacgctggagctgtgggtgtcgggtgtcatcgcagcccctgccccgacgacgtgtgcgacctcgtgtatggtagagcccgtgtagaccccaacagcttgtggggaaagggcatctaagagccctgcacggtaaaggagcgggtagccaaacatcgacagcgtaccgaagaggactaccgtcgctacggcgacgaccgtcttgtgtggcttcgctcctacgacgggctctgtggcgagtacagccgctgctccacagatagccgagcccgaggagatgagtaagcgttcgtctttgtccaagcccagcgctcgcccgaggtagttcccgaggatgagtgtcccagcgacgatgatcacgtcgatgaggatggcgccaccacctacggcgaggagcgtgtcgaagctcaagcggaagccatagagcacgatccccgcacgcaggatttgcttgctggcgatcttcatcccgccatcccagctctcgggaaactgggagcgaatggtgttggccaagatcatccccacgatgacgccgagcaccatcgggctgaggcgcaggtcgtggaggaagggcacgagcgaaagggcatggacaaggagggtcaggacgacgaggaagaggagaccgtggacggtacctcgagggagggctttcattgaattgctgtcgtgagtaatagatcttttgtcctgcaaagatacggcactcctcgctaccttatacaggtgggtcgtatgaacctatattggtcgctgggcgaacctatataggttcactcacggatctatataggtcacgacgccgacctatatagcttcacccgctgaccaatatgagactgttgctccgcgtatggataaaagttgtggacgagtggcagataagtttggactacgcacgtggctctaatatctacgtacgtggatatttggatttacgtgcctggtctttaagactacgtgcatagatgcggaaaaaccactacgggaaggtgcttttttcttcacgagaatgacacttttccctccgctggataagaggaatactcgcgataaagcgaagggcttgctcggtcgcttctgcgaggcatatcggggagctgggcgtgcgatgccttagcacaataagtagggggcaggactctcggtaacagtctccatataggttcgctcacccctctttaatgctttgggtggatatggatataggcagggggacgaaccaatataagttcgtccccctgcctatatgatttcttgccttatatggctggcggtactgatatgcttacctccgtctgcccttcgttggggcatcagcccactccctcaggtagaggcgtgcacacatctcggcgtcatcgccagcgcggtggtgtgtgccgtgagtgatctggagctggtcgcagagggatgcgagcgaattgctctcgaagttatagatctgccgtgcacgtttcagcgagcagtcccacttcagctcaccaagctcgatctcgtagagctcggccgtacgctccagacagctgcggtcgaagggagcgttgtgggcgacgaacgtgtcgaactcctccagatactcacgggcaatctcctcccacacgtcggggaaggcaggtgctgtggcggtatcttcggggcgtatgccgtgtacttggatattccaataggcataggcattgtcctcgggctgtacgagccacgagcgcgtctcgacgatctcgctatcacggacgacgcagatacccacctcgcagatggagctgcgcttctgcgtagccgtctcgaagtcaatggcgatgaagttgagcttgctcattccgtagggtgatgggggagcttagtgcgtgcgggtcatgtcctcggggacgatgaggatgaagtctgccataccgcggtaggcttcttctagggcctggacatcctcctgcaggacggtcgtgatcgtcacgatgcgcgtcttgggagcgtagcgacgtaggtaggggatgatgccaccattctgtagggagtggtaggagccgttgaggtggaggaaggtatgctgagggcggaggtgctggctgatgcggtagcccatggtggcatccttgatggcttgagcctcttcgaggtggcgcttctcctgcttcttatccccgtggacgagagcgcccatagcggcgaacatccccgcactctcctctgtggactggaaggcgatgggcagagggggcagatagcgcttggcctcggcactaagcgagtcgagggcgggaaggcccttgcgattcaccaggtcggcatagcgacggggtacgttcgtcgcgatgactctaagaccatggtccttggcgaagtagacgacggggtcgtagtccgtctcatagttcggccataggcgagcctcgtcgccgtagctcttggggctgatggtcttggcgaggtattcgtcgaggatcagctggatatctgcctcgagcatctcaagcccgagggtgaggttcttccccttacgctgctgcagggcctcgaggacacggagctgcatccagtggctgatgggattgttgtgcagctccccgaagaagacgacatcggcaccagcggcgcgtgtgatgagcttgtcgaaggtgacggggcgcccgacggagtctacgagacggtaggcgacgggttcggtggtcttctgcgctgatacggagagggagaagagaagccccgtgaggagcagggtgagggtacggaggagtttcattgcttgggtacaatcgaatagatgaggtggcgctgagggctgaggatcgtgcggaaggcggtgcggagctcctcgggtgtgatggagcgaaggatctgctcgtactgagcgaagtcctcgaggcgctccccgctacgcacgaggccaaggagcatatcttgccaaggagccagatcgctctcagtgagggcctcgcgcttattgatgaggaaggtgcgggcgatgtcggctatttcgctggggctggcgagcttcgtctggaggtcttcgaccagctcctcgatgagcttgcaagccaggggcgcattgctacttttcacaagtgtctcgaggcggaaccatacgaagggctcgggcttcgggtggtactccatatagagatagggcgaatagatgatgcccgcctcggagcgcaggcgatcgatgagacgactgcgcaggagctcacgcataagcttgaggcgtagactaccacgtagggtaggctcgtaggtgccgtagtagacgttgtgcagtgccgtctcgtcgccagcatcgatatcctcgagggtatagttctctgccgtgagctggccctgagatgggagggtgggcttcgcggggcgctggggaaggtcagcgaagacgcccgagatttccttgaggagagcttcgctgtcgaagcgcccgacgactacgatcgtcatcccctcggtgcgcgtccacaggtcggtatggaagtcgatcatgtagggaaggctgagggcacgtgcttcggcttcggtctcaggttcgcgctgggggatgtaggtgccgaggatgctatccagacggcgctgtagcttgagctcagggtcacgggcaagcatttgctccagacggctggggcgcccaagggcggagataagtgattcgcgtgactcctcgaagtcagccgtcgcagcctcggggcgcagcatcttctccttcattaggcgcaggaggctgtacgtcttgcccgtgggagcggtgccgaggagtgccccccagtccatggcttcggtgagggtgagtgctacgccgtggtcgaagaggaagctatcgagctgctcacggggtagggtagcgacaccacccagctccatgtaggccgcgagcgaagccacgcggggctgctcgtcaagcgggatgtcacgcaggcccgaggggtggttgatggcgatcttcacgacagagtccgcttcggggagggggcgcaggatgatgcggatgccattggggaggtaggcttcctgcacgccgaggtcggggtgtagcttcgacgaacggagctgtgccgtggggagcttctgtgggggagtgaggagctgtgggatggcgctcttcttctcttcggtagcctcatccgaaggcggagtgaagctgagacgggtgcgctgggcggagagtccgcgctggatagcacgctcgatggcggcacgctgtgggcgcgctgtctcggggagctgcgcattgtgtgtgaagctcgccagcttgcttggcccagtgaggtagcggtagaggcggtcaaaggcggggcggagatcgctggcgcgtaggccgtcaatacggcgctcaagctccttcttctccgcttcgtcggtgaggaagtggtcgccgtggaggatctcatcagtgtagtagtcgcaccagccagccgagggcgtatcgcctgtgacgacgtatagggcggacttcgcacgctccttgaggagggtgagttcgcgctccgatatcgtgcctcgtcgcagtacgctcagtgctgagatagcctcgcgaaggtcgtggaggatctcggccgtgcgactgccttcgagggtaagggagaggtgactcgtacggccaagataccagctgtcagctagcttagcgccacggagcttgtcgagtcggtgactccatgcagcgagtgccatgcggtggaccttctccgtaaagagctcggagagcgtccgtgtggggagggtcttgtgggggaagatgaggtcgagggtcgctgtgcggatgagggtatcgctatggctctcaagatgtaggccacgcgggtagtgcagctctggctcgatataggtgcgggttggggtggtgggggcggtggtgaaggtcgcgcgtagactctcctccgctgcatcgaggtcaaagtccccgacgaggacgatggtcgcaagggatggacgataccagcgatggtagaaggcacgtaggccgctcgccgtcgcacggtcgatgtcttgtgctgtgcctacggggaggctacggctgtggatgcccgtgccgaccttcagcgcatagaaggggtcggtctgtacgtaagcgcgtatctcctccttgatgatactgcgctcctgctccacctcgaggctgtcgagctgtagccccgtgagccaatcgctgaggatgagtgccgtgctatcgaggacgtgcggctcatcggtggggagggagatcatgtagacggtgcggtcgtgaccagtcatagcgttcagcccgacgccgtagcgtgtgccgagacgctctgcgtagcgcttgataccgcccgaggcaaagtgcttcgttcggccgaacgccagatgctcgatgaagtgtgcgtagcctgcttcgtcgggacgctgaacgcaggagcccacacacataatgaggcgtgcctccatcttcttgcgtggctgagcattgtgtcggaggatgtagctcatcccattggaaagcgtccctcgtcgctcttgggcgagagcggggtaggcgaaggagaggaagaaaagggtaaagaggagggggagccctatggagcggcatcccttcttctccacacagctggtcggtgtgtatacgtatctgtctattgccatcagatgctacttttcgctaatagatacaacgccgtaggtatgccctccggttgtcaatccgtcaaatatccctatttcttggtagctctacaccctgccgtggtacgagaatggagccgcagatcttggtctacggctccatatttatatcgtgcttctgcagaggagagcatcgggatcagaagaggagaggcgcatcgcccagccgggcgctcagctcttcgggcgaagctgtgctggggcactcctcataggagaggcggaaggtgcagccctcacggaaggcggagcagccgaaggccgcacgacctcttagaagggtcccccgctgacactgggggcagggcaggcccgtgtcgacgggaagggtgggggcagctggctgaggtgctggtgccggctgtggggcaaggacagactgcaccagctggtagagcatcgccttgagatcgtcgatgaagacttgcgtctccagctcacgacgctcgatctgacggagcttgtactcccattcacccgtgagtgcagcgcttttcaagaggtcgtagttgatgagcttgatgagctgacggcccgtctcggtggcgtggatctggttgcgcttctccttgacgatgtagccgcgcttgaagagcgtctcgatgatgttggctcgtgtcgaggggcgtccgataccattctccttcatcgcctcacggagctcttcctgctcgacgaacttgcccgcggtctccatagcacgcaggagcgtcgcttcggtgtagtacttcgggggctgggtctgcttctcgcgtagctcggggatgtgctcgcccgtctcgccttcggtgaaggtcggtaggagtgcttcggatgcttctccgccctcttcgccttccttggcttcgctcgcctcggtgggtgtctcggtctcgaagaccacacgccaccctggctcaaggatttccttccccgaggtcttgaactttaccttgcctgctgtaccctcgacgctcgtcgtactgacgaggcagtcggggtagaaagctgcgatgaagtggcgggcgatgaggtcgaagaccttcgtctccgtctcggagagccccgagggcgactgccctgtggggatgatagcgtggtggtcggtgaccttcttgttgtcgaagaccttcttactcttgcggatgggggcgccactgaggagcgggctcaccagattgagatagggtgggatgacgaggcctcgcaggatacctgcgatcttaggatataggtcttcgctgaggtaagtggtgtcgacacgtggataggtcgtcaccttcttctcatagagcgactgcacggtggcgagcgtctcttcggcgctcataccgaacttacggttgcacgctacctgcaggctcgtcaggtcaaagagcctcggagcggactccttgccgtccttcttcttgacactggtgatggtgaagggctcgcccgtaatgctttgtagggcagcgtcggccttcgccttgtcgctgtacttgcccttgtcagcgctgaagatgacctcgcggtagcgggtctttagctcccagtaggtctcgctcttgaagttctcaatagcctcttggcgctcgacgatgagggcgagggtgggggtctgtacgcgtccgatggagaggggttgcttgcggtcgctgccaccgtagcggagggtatagagtcgggtggcattcatcccaaggagccagtcgccgatagcgcgcgctaagcccgcctcatagagagactggtagtcggagccgtcgcggagcttatcgaagccctcgcggatcgcttcgtcagtgagggaggagatccatagacggcgcacgggcaccttgcagccgaccttctggagtacccagcgctggatgagctccccctcttgccctgcatcaccgcagttgatgaccatctcggcgcctgctacgagctcgccgatgacggcgagctgccgctcatagtgctcgatgggtatggccttgatgccgaagcgctcggggatcataggcagggacgccaggctccacgccttccaccccggcgtatagtcgtggggctctttcagcgtgcagaggtgtccgaaggtccaggtcacagcatacccgttgccttcgtagtggccgatacctttgtcggtcctacggacagtggctccgaggatgttcgctatgtcacgtgccacgctgggcttctcggcgatgcagacgatcaagatagtatggagtgaggggtgagacgggctggggcgatggtcgatgtgagtaggtgcagcgcagatgatgtgccgcagaggagtgccctttcagtgggctgatctccgaatgcaataggcataaaagagagaaacatcccaagatcacttaagtgaatcttagaatgcctcatcaaacaaatacacatcaaaactatggaaacctattggagcggaagacgggactcgaacccgcgaccctaaccttggcaaggttatgctctaccaactgagctacttccgcatttcaaatttgctctgggaggtttgcctttcccttttgcactgcaaaggtacgacgaagttttgaattgaccaaatgttcggcgaaatttcgtgcaatttctcttctcgcctctcgcctaaggtgaggtgatctgcctcttctccagatatagatgctgattacaaggtagaataaaacgagctcattttgagggaattggagcggaggcctacaggagggtggtgtgaacctatattggtcagtgggcgaacctatatagcttcacgcagcgacctatattggtctgcatctcgaccaatataggttcgcccgctgaccaatataggttcgctccgcatacaggtagtgttggaagtaggattactattccttctcggtgccgacggcctgcgcttgagggagcttctgcgcgtcttgtccaagtgccttctcctcgcgagcaaccctacgctccagctttttgatgtcatcagcgggtggcaactcttcgggctttattcctcgttcgccaagcatgctgcgcacactctcattattctgtacatgctcttgcgttataggtagctcgccatggagatctttactctcgacattatagttggtcatttcggttgcgaggttctttgctgctatggtgagggtcggaaggaagtctgcgagtggtctattggccttaacccccaactttttcttcatagcatccgtcgtgaagccaccgaatagagccttgtcgcccatcgagcgtatgcgtccaaaccctctctcgtcgacaccacgctcgtaaatgttctgagacagttgcttctccgagattcttagtcgatctcgtgtctccaggcgggagatgaggttaaggcgctcttcgatgagctccgcttttcttgtctgtagcgcaaagtagctttgagcaaaggctatctcttctttcttggggtcgccattctgtgcgatgaggtagcatgcgtagcgagtgagcataaagtcggagacctctctttgggctccgcttccgagtttgaccattttcgtgacctcacgaaaatggtcaaggtcattgacctcattagatttgcatgaggtgattgctctttggatagcgactgcaaagttctcccatcgagcgtagcctaatagctcttgaagttcacgagcataccatacttcgatatgcgtttgctccccttcgatctctatgcgctgagcgatagcatcgaagctggattggtattggatgatgcgggccttatccatatccttcttgttgattggtttgtatccagtgcgtcatgcttgtttgtgacggagcctatatgaataatgctctcctattacaatagctgggctatgtcattgatgtagggggctggtgtattccgatgcggtattgattagacgtccgtgtcacgactggcaaacaaaggtagtgataatctaaccaaagagaatctgcggtaaagaggagtggattaaggttttagcttcggattacactctgaggtgatgggagatattgccttgactgcacgaaccagtagagtgtatggtcttcggataaaaggggcgttttttagggtgaagcaaacagccttattattatgcaattagtgcgaagctgtagaggagataaaatgaaccagtactggtcgctgagcagaccagtactggtcagcaatagtgaccagtactacttcacgtcgcgaccagtagtggtctgatcgccgaccagtactggtcgctttgcgaaggaatatgtggagagaattgcctcctcccacgattgtgtggtaggtatataagcaccacgccccaccatccgctgtggaatggtggggcgtggcgatagtgggtgtacccccgagcagaatcgaactgctatctaaaatttaggaaattcttgttctatccgttgaactacgagggcccatctcctcttgcgctgagctcttgccgcgctgagatgtggggcaaagatagtcattttatacttgcaccctcgtgagcagacgtgaggtcagaggcggaagaaatagttcagcgtcgccccgaagtacatctccgacgattgtacataggtcgagccacgcttagagctccagaggttgcccagcccgtagacgaagcgcccttcgagctcgacacgctgacgcttgccgatggggatgcttatcccaggcccgccaccgagcccccagaagaagcgatcgcgcacggccataccgtggcgggtggagtccagtgcggacatattcgcctcgcctgagctggtagctgattctccgagctgatagccgaagaacggccccgcattgatgaagatgcggatatctcccgagcggaagtagaggtgcgtgagtaggggaagctcgagatagtcgagcgtgcggctgtagctcgtggcgagggcatcatagcgctcctgccagccgccacggcggtagttcagctctgcctgcagtgatgccccgcgctcgacatcgtagcgcacggcgatacccgcgatgggccccgtatgtaggcgctgacgtaccgaggggacgaaggtgaagcgactggcagtcatgccaccatgtaccccgacggataccgactgggcgaagggctccttcgtcgtctgtgcactaaggcgtgctcctgctactgcgagcaggaggcatatcaagacgaggctctggcggagggaactaatgagcttcacgcgtgatagcacctgagctggggtagtggacgaagaagaagcgggtattcgtgtacacgttcgcctcgtcgctacgctggaggtagaagtcgagctggaggccgtccgaagggatggacgacatgctgttgatgaagttgcggccgtacatcgagtaggcgcggatgaagtagcgtgccaggtcatagccgaggacgctgtacttcggataggagttgctgaccttgtggctgaaccatccagtgaactgactcaggaagtccttcgactcggcaagcgtaggatcgaagaagaacgtcgagtagatggtcgtgttgtagcgacgcaggctctgctggaactgcgagccgtaggcctgccactgagggtggccgaagagcgtgacgccactcgtacgcgtgccgatagcagccatagttgccatcgcgaggttgcggtcgggagagacgggcacaacgacagcgtccgagctgatacctccgacggcaccactacctacctgtatggagcggaagggcagacctgcgtggctgagtgccgagcggagctggctgacgaagccgtcttccgtgtcgccagggcgtgaggcgaagatgacttcacgacccttgtacttctgcaggaaggcggggacgacgcgatcgatgatggtggcggtgtgggcgttggtcaggatgacacggccttcacccgtctcgaggtgactggccttgctgaaggggatgatatagtagttgtatcctgcagctgcggagatagcgcggatctgcccctcggtgacaccaccgatgacgaggtccttaccacggagctttccagcatcaatgtaggcatttagcgcttcatcgttgggcacatccagcgtggtgagctgcatcgagatcccagccttcttgagctgatacataccgaggaggaagccttcgtagaactcaacgaagtgcttgtccttcttcagcggtaggagcataaggatgcgcgtctgcgaagcggctacctgtgagggtaggctgctctcgccttcgtcgctcttaggcgtggtggtcgtagcgctgtcacccttagcaccagggatgacgagctccatgccgaccttgacggtggaggaggttaccccggggttagcgcgcaggaggtctgccagatcaatgccgtagctacggctgataccatagagcgtctcgcccgtctctacgcggtgcttcttcgggctctgtgaagaggatgaagcgactggtgtggaggtggtggcaggtgtagcgggagtagaagggatgaggagcttgtcgccgaccttgatctgctggcgagcccaagggttgagctcgtagatcttatcgatggcgacaccgtagcgacgtgcgatgctatacaccgtctcttcgcgctggacctcgtgctcacggatgcgtcgcccgccctgggcgctggcacctatatatataaggagtgcggtcgatagcaagaggagtgcgcggcggcaagtgtcggagagggtcatctgtctatacttagtcttgtgatgaatatgaggcaaaggtacttaatcgtgtgcaaatgagctcggagctactcgggagagctgacgtagtcggtgactccagaggtggtgaaggaggccatctcacggagcattcgtgctgccgaatcgagtatagggaaggcgcagatagcccccgtcccttcgccaagacgcatgcctaagcgcaggatgggatcggccccgaggtagcgtaggagacgagcgtgccccgcctcatcccctgcatgtccatagaacgcataatcagtgactgctgggtataatgctcgtgccataagtaggcaggccgtcatgatgaagccatcgacgaggaaggccacgcggcgctctgctgcacggagcatcgccccgacggtgaccaccatctcgtagccaccgaagtagcggagtatagcttcggcatccacaggaccgcgatagttgtccacagcctggcggaggatggcgagcttgtgctgtacgccttcgtagtcaagtccgctcccacgacctacacattcctcgagaggaaggtcggtgaggtagtacatccagagtgccgaggtagaggtgttggcgatgcccatctcgccgaaggagagaagcttacatccgcggtcaacggcctcgtctaccgagacgacgccgatagagatagcgcggtcgacctcctcctcagtcatcgcagactcgtggaggaaggagcgggtacctcggcggatcttgcggtggataagtgctgtcccttcgagggggaactcgtgatctaccccgacgtcgacgatgtgcagagcgaagtcatgctgtcggcaaaggaagcatatccccgctccaccacgtagcatgctgtagacgacctgatgggtgacctcgcgcgggctcttgctcacgccctcggtctcaattccgtggtcggcagcgaagacgaagtgctcacgtggcgagaggctgggctgtagggtgtcttggagtgccgcgaggcgtgcggcgagtgtctcgagcttgcccatagcacccagaggcttggcgatctggtcgatgtagcattgggcacggtagatctcttcctcggggatggggcggatatcgaagtcttgcattgtgatagggagtaattcgggtgaggtcagcccttgacggtgaggggaaggccgctgaccatcagggtgacgcggtctgcgcgggcggctacatgctggttcatccagccctgcagctgggtgaagaggcgctgtgtgcgggactcggacatgccgcccatgcccagctcattggtgacgaagatgaaggtagcgtcctgctggatgagcgtgtcgaactccttcttgagagcttcgagcgcctgatcgacgtcctgctgcatgtcgaagaagtagttcgtcgcccacagcgtgatgcagtcgatgaggacgacgcgccccgtgaagtcgtgcttggaggggtggatatcctcctcgatgttcgtccactcggggccgcgacgctcctggtgacgcaggatgcgctggcggaactcttcgtcccagatgcgggccgtcgccagatagacgggctgcccgctgaggcgcagcgcttcgctctcggcataggagctcttgccagagcgctcgccgccggtgatgagatgaatgtagctcatagatagtcaggtgatggtagtggggtgtggttaggctcgtgtcccctcgatgcggcgctggaggatgtgctgcatcacggtgatagctgcggcgacggaggggatatgatgcacgcggatgatgtggcgccccgagcgctggacgaactcgcactgacggctgttgcgtgccacgtactcgaggaggcggccgaaggtctccgaggcgtagtacgggctggaggtatcggcgatgaggtggagactcatagagccacccttgagtacgaccttctcgatgccgaggtgatggccgaggcggcgtaggcgagggatgaggatgagttcttcggtctctgggggaagggcaccgaagcggtcgcgcagtcgggaggcgaagtcctcaagctccttgtcttcgctgaggctgtccagctcacgatagaggaggatacgctcgctatccgagggtacgtactcgtcggggagggcaagctcgaggtcactctctacctgcgtctcgacgacgaagcggtcagcaagctcgctaccgtcactctgcttatcgtcgtcggcatagacgtgtgcgaactcatcggccttgagctctcggatagcttcggagaagaccttctgataggtctcgtagcccatatcggtgatgaagccactctgctcggcaccgaggacattgcccgcaccacgctggtcgaggtcctgtagggcaatgcgtatgccactgcccagatcgctgaagctctcgatagcacgcagacggcgcttggagtcttcgctgagtccctcgagcggaggagtgaggaggtagcagaaggccttgcggtcgctacgccctacacggccacggagctggtgaagctcgctcaggccgtagtggtgcgcgtcgtggatcatgatggtattggcgttcggcacgtcgataccattctcgatgatcttcgtcgccacgaggacgtcgtactcgtggttgccgaagtcgatgaggatctgctccatctccttcggtgccagctgcccgtgggcgacggcgatgcgtgcgtcggggacctcgcgttggatgagggcggcgaggttctcaatgttgctgatgcggctattgacgaagtacacctgcccattgcgactcatctcgaagcccacggcctcgcggatgatctgcggggtggtctgcgtgaggagcgtctctacgggacggcggttggcaggcggggtgttgaggttcgagaggtcacgtgcacccatcagcgagaactgcagggtacggggaataggcgtggcactcatcgtgagcgtgtcgacattgacctgtagctgacggagcttctccttcgtggcgacgccgaacttctgctcttcgtcgatgatcaggagaccaaggtcgtggaacgctacgtccttgctcgtcaggcggtgcgtgccgatgatgatgtcgatcttcccctcacggaggtctgcgaggatggcacgaagctccttcggcgtacgagcccgggagatgtagtcgacacgcacggggaagtccttcagtcgcttggagaaggtgcggtagtgctggtatgccaagaccgtcgtagggacgaggacggcgacctgcttgccgtcggtggcagccttgaaggcggcacgcacggctacctccgtcttaccgaagccgacatccccgcagaggaggcggtccatcggataggggcgctccatatcggccttcacagcggtgacggcggcggcttggtcgggggtgtcctcaaaggcgaacgatgcctcgagctcgtgctggaggtaggtgtcggggctgaaggcaaagccctccgtctcacgacgcttggcgtagaggcgtatcagatcacgggcgatatccttgatgcgcttcttcgtgcgctccttgatacgctgccatgcccccgagccgactgcactgagcgtgacttctttccccccttcgcccgagcggtagtgggagagcttgtgcaggctatgcaggttgacatagatggtgtcattgttgcggtagacgagcttgacgaactcctgcatgtggtcaccctgaggcatactcaccaggccgtcgaagcgcccgataccgtggtcggcgtggacgatgaggtcgccacggctgaagctctggatctccttcagcgagagtgtgaccttcccggagctggccttgtcgctacgtagggtgtacttgtggtagcggtcgaagagctcgtgctcggtgaggagtacccagcggtggtcttcgtcgacgaagccctcgtgcaggccgagggtcacctctgtaggtagctcggcttcgctgaggcgtggggtgaggatgtcgcgggcacgctcgtgaccctcacggcttgctgcacatatatatatggtatagccgtcggcacgccaagagcggatctgggcggccagaccatcatagtccttatggaagagaggctggcgtgtggtgtggaagtgcaggccattcggtgtagcttcgtccgtcagctcgtagcccgagagtgcctggatctcggcgaagagctggctgggctcgatgagcatgcgtcgcagtgcctcaaggtcttcgaagccttcgccgtcttgcagcagtggggcttcgttccaagtcatctcaagtcgggtactcagcgatccgccacccgagaggaggagttgagtgcctgcagggagcaggctgatgagtgaggtgaggtcgcccgagccctgagataggtcgggactcagcgtgatctctgtgagctgacgtacggagagctggctatcgacctcgaagcagcgtacgctctcaacttcgtcatcgaagaagtccagacggtaggggagctcggaggcaaaggaatagatatcgacgatgctcccacgcagggcgaactgccccggctcatagacgtagtccacgcgctcgaagccccaggcgaggagctggtcacgcaggtggtcacgctcaatgacgtccccccgatggatgatgaggggctcttccttcgtgccactctcctgagggataccctccatgagggcctcgggataggtgacgaggatgggtaggggagtgccgcctggtgctgctgcgcttatcagggcgctgagcaccatggagcgcaggagggcactcgactcatcgcggtgcccatagcggatcgcacggcgataggctgaggggaagaagagtacaccatcctcgcccaagagctgggctaagtccgaatagaagtagccggcctcctcttcgtcacgtaggagcgccacgagcggtgccgcctggcggatgcgcggagcgacgaaggcacgggcagaacccataagctccgagagggagcgacgggtgtgaggtggaaggggctgggagagggagactccttgctcagaaagccccatcataaggggcggctggaaggtagggcgggatggatttgtatcgacctgtttcacactgcgaagatacggcttctcccccacgtatggagcctgtcgtgctattccttttcgtggggcagaagttgcctctcggaagaaccttcctacggcgggcttttctgcgccttagtagtaagggtgtgcgaaccgtattggtcggcgggctgacctatattggtccgtgcgtgaacctatattagtttgttgctccgcgtggggataaaagttttggacgagtggcagaaaagtttgggctacgtacgtggctctaatatctacgtacgtggacatttggatttacgtacctagtctttaagactacgtgcatagacagaggaaacccactatgtgaaggtgctttttccttcacgagaaggacactttttcctccgctggataagaagaaaagagggtggaagagagccgtcataggtgggagatccgatgacgaaaaacctgccgaattcacgcgcttttactgataaatcaaggatacttcctaaatttggggttatgatcaagcggaattctctaaagtggatggccgttgtcgctgtcttcctctccttcttcccttcgctgtgggcaggctcttcggatagccttttggtgaagctcaatcagacgatcgagcagcgcccgtcctacatgcagcgcaaggaggaggccttagagaccctgcgacagagcttgagtaagctgagtgcagggaacgtggaggggcgtatgaacctctacgaggcactgtggcaggagaaccgctcatacaataccgactcctcgctcttctatgctacggcactctcccagctggcacagcaggcgggcaatgaggagcagaagcagaacgccctgctccatcgggctacggcactgatgacgatcgggatgttcaaggaagccgatgagatcatcaagccgctgcgtgaggggggcgtcctcccagggcagcgtagccagttcttccacctctgccgaagcctcttcggtctcatggcggactatgccgtgacggcgcaagagaaagcggcctatgccagcctcaccgatgacttccgtgactcgctcttgacgatctatgagtcggggtcgaatatgtatcggatgatctatgccgataagctgactgcccacggcaagtatgccgaggccctacgtgagctcctgcccttcacaccaacgggcgatgggcgcttcgatgcgggctaccactacaccatcgccgaggcctactaccacatggggcgtatcgaggaggctcgacactactacacgttggctgctatcagcgacatgcagagcgatacacgtgagtacatcgccctgcgcaagctcgctgtgatcctcttccagtcgggcgacatcgaccgagcctaccactacctcacgctgtgtatggccgatgcgaaggcgtgtaatgcccgcctccgtatcctcgagatcctcgataccttccctgtcgtcaatgaggcttatctggagaagaagcagcagcaacagcgtgtcatcacaggggtccttattgccatcagcctccttgtcgtgagcctcatcttcgccatcttcagcgtcctgaagcagaagaaagccctgcagcaggcgcagacggatctggcgcatgccaatagtcagctcaatgaggtcaaccgcacgctcgtggagtacaacgaggagatgaagcggcagaatcagctcatcaccgagacttcgtacctcaaggaggcctacatcactcagtacatggatcagtgctcgacttatctggagaagatggagagcttccgtaagcgcctgcgtcagctcctcagcgctggtaagacgaaggagatccagcaggccctcacctcatacaatcaggaggtcgagacggagctggcagagttctacgacagcttcgacacgaccttcatcaacctcttcccgaccttcgtcgaagacttcaatgcgctcctccgtgaggacgagcaggtacagctcaagccggggcagaagctcaataccgagctgcgtgtcttcgcactcatccgtctcggcatcaccgacagcaccaagatcgcacacttcctgcgctactcggtgacgacgatttacaactaccgtacccgcatgcgcaatcgtgctcgaggcgatcgcgacgagctcgagaagcaggtcatggagatcgggaaaaaggctctgaaaggcgctaatccgccccaataatcactactttttttgtctataaaaatagggtaagttgctaagtatcagagtggaagtttctacaccaactatatacttagtacctctccctcttcgcgtatgcatttcgtctatcttcgttggtagcgatccaggtgagctacggctcagccactcatccgagtcgccagatacctaactgttgggataaaaattctaacctacatatcaatgatggaaactgtacaaagcgtggatacctcgctgcggcgactactcctctcatcgaccttggtactcacctcggtcagcctctttgcccagaccgtgagcgtcaagggtaccgtgactgatccagcaggtgagcccatcatcggggcgaccgtcctcgagaagggtacgaccaatggtaccatgaccgatgccaaggggcacttcgtcctcaaggctaagaatcctaaggctacgatccgtgtgagctacgtcggctacaagccccttgagatagcccttgatggacgtcgtgagatcaaggtcgtcctcaccgaagaggcggctacactcaatgaggtcgtcgtcgtaggctatggcacgatgggtaagaaggagctgacctccgctgtcacccacgtctcctccaagaacttctctcagatggctaccgtcgacccctcgatgatgatccaggggaaggtcgctggtgtgagcatcacgaataccggagcaggtgaccccaataatcaggcaagcatccaggtgcgtggggtctcctcccgtgctgcaggccttggcccactcatcgtcatcgacggggtgcctggtggcaacctgacgaacctcaaccccaacgatatcgagagcttcgacatcctcaaagacggagctgccagtgctatctatggtacgcgtggatccaatggggtcatcctcgtgacgacgaagaagggcgcccgtgacggcaacctccacacgacctacacgggtacggtctccttcgacgtcatcaagcgtgagcttgatatgctcagtgctgatgagtatcgtgcgaaccgcttggcctcgggcgtcggctacgacctcggaggtagtgtcgactggcttgatgcggtgagccgcatcggggcacgtacccagcactcgctcagcctcagcggtggtagtgctcgctcgaactatcgtgtgtcggctgactaccgcagcgctaatggtatcgatctctattcggggcgtgaggaatatggtgcgcgtgtcgcactgaaccatacgacgaagggtggactcatcaccttctcgctgaatgtcgctccccgtatcgcctaccgcaagaatgcctcttgggacgtcttccgcaatgccgtcgaggctaaccccacgacgcctatcatggaccccaaggatccttcgctctactataacttcaaggggcaggctgctggctataaccctcttgagctcctcaagaaggacaagagcacgggtacgacgaagctcctcgactgggacggtaccgtcaagctcaacctcctgcctcttctcctgaataaggaggatcgtcagacgctgaccacgcagctgaccttcgctgaccaccagtatgacaactacaatcagtggttccgcccctcgacgagcacgctggcgatcaatgccggtcgtgaaggtgaggcctcgcaggactactcgaagagtgctatacgtaccctcgagtgggtcacgaactacgccaactccttcggcaatcacaacttcaaggtgatggcagggtactcctatcagtatgagcagtactcagggctgaacgctgcgaataaggacttccccaacgatgcgctcgaggacaacaacctcggtagcggtacttacgctaaggatgaaggggagctcggtatggggtcctataagaatgactccaagctcatctccttcttcggtcgtgtgagctacgactggaagggccgctatatgctgacggcttcactccgtcacgaaggctcatcgaagttcggtgagcaccacaagtgggggaacttccccgctatctctgccggctggcgtatctctgacgaagcctttatggctgggacgaagagctggctcacggacctcaagcttcgtggtgacttcggtatcacggggaaccagtccttcgacagctaccgctcgctcaacacgatgtcgggcttcggctactacctatataatggtaagtactatcaggtatggggccctggcaagaacgtcaaccctgacctgcgctgggagaaggggcagaactggaacgtcggtctcgactggacgctcttcggtggtgacctctacggctccttcaactactacagccgtaagcagcaggacctcctcggtgactacaatgtctcggtgcctccctatctcttcacctcgacctttgtcaatgtaggtacgatgcgcaatagcggcttcgaattcgacctcacgtggaatgccgtcaagacaaagaacttcacctacacgatcaatgtcatcggggctacgatgagcaataagttcgtggacttcagtaacgataagtttgtcgggcaggactactacgacgtcgtcggtacggaggatccctatcccttccacaacctgcagcgtatcgagaagggcaagcgtatcgggaacttctacatgctgaagtatgctggggtagatcctcagggtcgctgggtcgtctacgacaaggacggcgacaaggtccttgctgataatgctaccgacgatgaccgccagtatgtgggtaatggcttgcctcagtttaccggctcgatgacccacacgctgcgctacaagaatatcgatgcctcgctcttcttccagacggcactcggcttcgacctcttcaatatccacgacttctactacgggacgcggaacttccagggcaatgtgatggacaaggcttatagcaagaataagatcgtctcgcagaaccccatcgtctctgactacttcctggagccaggggactacctcaagctctcctcagtcagcctcggctatacgctgaatctgaagaagaagtacatcgatgctgtacgcatctatgctacggcgagcaacctctttaccatcaccaagttctctggtatcgatccctcgaactatcaggtcaatgggctgaacccaggggctacgggctcccgctcgtactacccctcgacccgtcagttcatgatcggtacgcaggtgaacttctaatctactgatggacatcactgtctgtgacatcatacagagtaagcaatgagaaggacaatgaaatatatggcaggtgcgctcgtcgctgccagcctcgtgggatgtactaacctggacgagaatctctacgatcaggtcgcctcacagaactactataacacgaagtcggacgtcatccgtgccgtcttccgccccttcgagcacgccttctggagcgtgcagagccgtcacgtgctcaatgaagagtccgctgaccagctcatcacccccacccgcgaagactggtgggatgatggtggccgctgggcacgtatgcaccgccatgagtggctcacgaccaatggcgaagcccagacggagtacaatggttgcttccaggggatcatgcaggctaacctcgtgatcgaggacctcgagcagcgctcagctgcgaagttcgggttctccgatgcggagttcaagaacctcaaggcgcagaatagagtgctgcgtgcgtggttctacctccgtctgttggacgccttccgcaacgtccctctggcggtgagctactacgacacgagcaagaactccacgggtcaggtagagcctcgcaaggtctatgacttcatcgagtctgagctgaaggcagtcctgcccgagctgactcgcaagacgtctctcggtggcaatcaggccgcacaaggtcagtggacgcaggccagtgccgcagccctcttggtgcgcctctacctcaatgcaaaggtctacatcggtgaggaccactacaccgagtgtgcgcagtacgctcaggatatcctcgacggcaagtacggctcatacaaggtagctgatcgctgggacgctgccttcgactgggacaaccagacctccgacgaagtcatcttcgccttcccaggctcggcaggtcgtacacactggcactacaatggtgatatgttctggtggtctgtcccctctaaggccagtgactggctcaaggatacgaagaataaggtcggtacgcacaacatcaagtactcggcttctcccagctacaaccccaagggtgagaagtacacctatgagctgggtatgcctatcgagcgcttcaagcaatatccctccgatgtccgcctgaagatgtacacgaacctcggtaacaaccgccgcaaagggctcttcatcttcggcaagatctcctatacggatgataaggggcagacggcttacctcaaggatcacaacggtcgctacacgcttgacctgcgtgatgccgtagggaagttcggcggtaccgacgggaataagtggctcgctacctctgagagccgtctggaggacggcgatgataactctggctggatgttcgccaagtatcccctctactcagacgatgagtcagggcagctcgaggcagactattgtgagattcgcctgcctgagatcatctatagcctcgctgaatgcaagctccgcagtggcgatgcgaccactgctgcccagctattgaatagcgtccgtaagcgtaactatccctcctccgactggtcgacggctctctacgctcccgagggtacggcacagctcgatctcaaggagatgctcgccgaatggggccgtgagttcttcgctgaaggtcgtcgtcgtatcgacctcatccgcttcgggaagttcctcgatgcttggtgggataagaaggccgatgccgatagccacacgctcatcttcccgcttcaccgagatatccttggggctaaccgtaacctcaagcagaaccccggctactaactccactacatactaaggtgtaatctctaaagcacacagattagacatgaacagaatattcaagtatgggatatgggcgctcgctgtgctcgccgtcccagcggtcctccagtcatgccatgatgacaaggacatcgtagtcatcgacgaggagctacctctcaaggtcgaccatctctatatggtaggtgacgctacgcctgcgggctggagcattgacaatcctgccgagctggtacgcgatgccagcaataagttcgtcttcacctaccatggccgtctcgctgcaggggagctgaagttccctcttgctaagggtgactggggggcgaccttcatctatgctccgaaggcaaacaccgagatcaatagcaagggtgtcgccgagagcggcatcagcgtccgccgaggaggtgacgacacgaagtggaaggtcaccgagtcgggtacctatctgctgacgatcaacctgcgagagcgcacgatccaggctgtctatgagggtgcagagcccgtgacacctatcacgacctctacgcttggcttcatcggtgatgctactcccgcgggctggtcaacgacggaggctacggccttcacgaagacctccgacagccccctgcagttcacctatgagggcgcactgaagacgggcgaattcaagctcgtctctgacgctaccgtcctcaaggactacgctggtccctacatccaggctcccgaagcaggcgtgacgctcagccacgaaggggtgtccaagcagggtatggtcgctggtggcgcagacaataagtggacggtcaccgaggctgggacgtataagctcgtctttgacgtcacgaaccgcacgatcaaggtagagtccttcaccgctgcccccaagagtgatccttggaagaccgagacgctctacgctcttggcgatgctgctagtggctggaatatcggcgaggcgcttgccttcaagaaggtcggtgagcataagttcgtctatgctggcgagctcaaggctggtgcactgaagctcatggctacgaataccggtagcttcgatgacgtggctaaggactggttctatgcttcggctgccgatgtcgagatctcggacgttacgaccagcgcactggacgtcgtcgctggtaccaataagagtgctgacaataagtggaaggtcacgaaggctggcaactatgtcctcaccatcgatatgaagacgcacaagctcaccgccgaatacgtcggtggtgtcagcacgagtatcgctaccgctgaggcacgcctcgtcggtgatgctacgcctaagggctggaatatcaagggtacggcgatgacgaagagtagctcctcgcccctcgagttctcttggcagggtgctctcggtaccggggagttcaaggtggctctcacctcgaccaacgatgacttctctggtgactggcttcaggcccctcaggctgatacggaggtgaatgcctcgggcatcagcggtggcgacgtcgtcaagggcggcgctgaccacaagtggaaggtgacgcaggcaggtacctacaagatcaccatcaacttctccacgaagaagatcaacgtcgcgtatatcggtgcatagccgacgactctaacaagacaataggaatatgaagaaatatctcatcgccgcactggcgctggcagctctcataaccagctgcaatagcaacacgtgggacgtgacgagtgacctcagcgtcgacaaggtcgaccctacacagggcctgacgccactggctcaagaccccggcatggactatgctccgctctactggagcgtctatggcgcactgcgtcagcaggagaaggacggctccttccccaatatcttcaccgagaaggactgggacgaagctattgacttcgtcgctaccaagctcaagccctacggctacgatatgctcgtcaccgatggcttcgctgcaatgggtggggacgacggatatatgacgcgctacagccgctctcagaaggatgagagctctcccgagatcgagctctcgacgatcatcgccaagctcaaggctaagggcctcaagctcggggtctacgacaatcccttctggctgcactatagcaatcccaatgcgatcatcccaggtactgacggcatcaccgtcggtagcctgcgctacaatcccgagaaggataaggatgtcctccaccccacgaagaatgatcagttcggttgggtgctcaccgatcaccctggagctgagcagcacttcgaggccttcttcaagcactacgctgatatgggcgtacacttcatccgtatggacttcctctcttggtatgaagacggtatgaactacagcgaccagatcgaccgtggctatggtcgtgagcgctatgtgcgtgggatgcagtggatcaataagtacgcccgtaagtacggcgtctatgtctccctcgtcatgcctcacctcaagaacaatgcgatcatcgagaagtacgccggcaatatgatccgtatcaatgccgatgctctcgaaggctcttggtaccgcttctcggagaacaaccgtggctcgctacgtggtggctggcctaactcagagaatgcctttgacggcttcatcaactggtcgaagatctcgggtcgtggcaaggttcgcctcgatggagacttcatccgcctcggctccttcgccagcgatgacgagaagcgctcggctatctccctgcctctgatggcaggtgggcctattgctgtcacggactaccccaatgctcatgacctcaccttcttccagaatgaagagctgctcgccctgcagaaggacggcttcgtcggtcagccctacaagcgtgacctctgggggatcgatggcgagatctggtacggacagctgaaggacggctcttgggtcgtcggtctcttcaaccgcgatcagtctgccgccacgcgctccgtcacgctctcacagatcggcatccacggctcgtggaaggctcgcaacctctggacacatgaggatgaaggtacggtctcagggacgatctccgcagagatccctgcacatggctgtaagatcctcaagctctcgaagctgtaagatcctccgctccgagcatctatttaatgttgagtagagcctgttgcctgatgcgggcaggctcgtagtatgccccagcccaagtgcgggctggggcatgcctatctccacgagtttatatccatacaattcatatagctaagcagatatgagaagattctttatgcttatgtgcctcgtatgtctggggctcgctggtcgagtccatgcctccgaggtgacatcccccaacggtgagatgaagctgaccttcaccctccgtgactccaagccctactattcggtctccttccgaggtaagcccgtcatcaagcccagtcgcctcggctacgagctccacaatgcggagagcctcctcgagggcttcacgcagacgggggagaagacctcgacctttgacgagacctggacgcctgtctggggcgagaataagaccatccgcaatcactacaaggagctgctggtgggtctcatccaggagaagacggggcgtgtgatgaacctccgcttccgtgtatatgacgagggcgtcggcctgcgctatgagttcccacaggaggggagtaagctgaattacttcgtcgtcaaggaggagtgcactgagttcgccctcacgggtgaccacatcgcctggtggatccctggtgattacgacacgcaggagtacgagtattcgcgctcacgccttagtgagatccgcccgctcttcaagaagaaggtgacggacaatgcttcgcagacctccttctccgagacgggggtgcagacctctctgcagctcaagacggacgatggcctctacatcaatctccacgaggctgcgctggtgaactatcctgcgatgcacctcaatctcgatgataagaacatggtcttccgctcttggctgactcccgatgcacagggcatcaagggctaccttcagacgccctgccagagcccttggcgtacgatcatgatcaccgacgacgcacgcaaggtcctctcctcgcacctcatcctcaatctcaacgagccctgtaagatcaaggatacctcttggatccaccccacgaagtacgtcggcgtatggtgggagatgatctcgggtaagggtgactgggcctatacctctcagttcccctccgtcaagctcggcatcaccgactacgcgaaggctaagccctcgggccgtcactctgcgaataatgagaacgtccgccgctacatcgacttcgccgctcagcatggctttggtggtgtccttgtcgagggctggaatatcggatgggaagactggttcggcaactctaaggaatatgtcttcgacttccagacgccttaccccgacttcgatatcaaggcgctcaatgagtatgcccactctaagggcgtgaagctcatcatgcaccacgagacctcctcttccatcatgaactacgagaagcacatggaccaggcctatcagctgatgaaggactatggctatgatgcggtgaagagcggctatgtcggcaacctcatccctcgtggtgagcaccactacagccagatcgctatcaatcactaccagcatgccattgagcgcgctgcagactacaagatcatggtcaatgcccacgaggctgtccgtcctacggggctctgccgtacctatcctaacctcatcggcaacgagagcgcacgtggtacggagtatcaagccttcggcgggatcacccctgggcatacggctatccttcccttcacgcgtctgcaaggcggccccatggactacacgcctggtatcttcgagatgcagtgctccaatggctcacgtgccaactccaccatcggggggcagctcgctctctatgtgacgatgtacagcccgctgcagatggctgctgacttccccgagaactatgagaagcacctcgatgccttccagttcatcaaggatgtcgccctcgactgggataagtctatctacctcgaggctgagcctatggagtacatcaccgcagctcgtaaggcaaagggctccagcagctggttcgtcggtagcgtcacgggtctgaagcctcacaactctaccctgcgtctggacttcctcgacaaggggaagacgtatgtggctacggtctatgccgatgctcccgatgccgactacaagaccaacccacaggcctataccatcactaaggggctggtcacggctaagtccgtcctcaagctccactcggtagctggtggtggctatgctatcagcatcgtagaggctaaggatacgaagggtctcaagcccctgaagtaatccacctatcctatatagataaggaggctgagctacggcactatgcctgtgctcagcctcctctctttgtgcccttgctcgccctcatgataccccccacactctatatatgtatgcgtatgccgaagatgatctcgagcctctccctctctgcagctctcctcttctcagctgaagcccaagagcccacactaccccgtatggagctcgctaccgataaggcctgttatctaccaggcgagatggtgcacctcaccgcctcgggtacacctccctccgccctcttcatccgctaccgccacggagcgcagatcctcgctgaggtcccctatgccgaggtggtgaaggctggccgctggtcatggtgccctccacggcgggactttcagggctacctcgtagaggtctatacccgctctgccgaatgtgagctggtcgtcgctaccatcgccgttgatgtatccagtgactggcgacgcttcccccgctacggcttcgtggcggactttgatgacgggggagaccctgctgccaagcgcacccgcatcgccgaggagatggccttcctcaatcgctgccatatcaatggcgtgcagttccaagactggcagtggaagcatcattatcccgctcctctcgatgctaaggggcagctgatgcccgcctaccgcgacgtcagcaaccgctgggtcaaggccgagcacgtccgtcactacatcgagctacagcaccgctacgggatgaagtcgatcttctacaacctctgcttcgggtcgtggaagggagctacggaagatggtgtgtaggaggcttgggcgctctatgctcggcccaaggatggtgagaggtatcaggacttccacggcctgccctcgagctggcagagtaatatctacctcctggatccagggaacgcagattggcagcgctatctctgcgaccgcaatgacgaggtctatcggctctttgacttcgatggctaccagatcgaccagctcggcagtcgtggtccacgctatgatgcgacggggcgcgaggtccatctcccacgcgcctatgcctccttcatcaaggcggtcaagaagcgtcgtcccgagaagcgtctcatcatgaatgccgtctcgggctatggtgctgccgagatcatcggcacagggaagctggacttctgctacaatgaggtctggggcaatggcaacggctatggaggtacttccgaagcagcctttgccaacctctatgagatcatcaagcgcaatgatagcctgagccgtcaccgcctccctacggtcttcgctgcgtatctgaactatgataaggccgatcacggtgggcgaggggataagctgatgaataccccaggtgtactactgaccgatgcggtgatgtttgccctcggaggctcacacctcgagctgggagaccacatgctctcacgcgagtatttcccggccgcacccctggcgatgagccccgagctacgggaggctatcgtccactactatgacttcctcacggcttatcagaactggctccgtgggacgacctcccgccatgccttcacgcctcggatctcgacgacgagtgccgatgtccagctcacgacttggcctccgaaggcagatgctatcaccgccttcgctaagcaggtcggcccgagacagcaggtcgtgcatctgctgaacttcctggggacgaatgacctctcctggcgggatgtcgatggcactcgccctgagcctcgcttggtgcgtcagctaccgctccagttggagagtgcggagcgtgtcgtccgtgtctgggcagcctcgcctgacctgcgtggcggagcccccgagctcctgccattcacccagcgtagcggggtggtatcggttacgctccctgcgctccactactggacgatgctcgtcctggagctggcacccgctcgttagctccccctcattcataagttgataggtgttgttggccccgtctcgtagaccctcggtctatggggcggggcttcgccttatcgcgcgtattcctcttgtccagcggagggaaaagcgtccttctcgtgaaggaaaaagcaccttcacgtagtggttttcttctatctatgcacgtagtcttaaagaccaggcacgtcaatctaaatattcacgtacgtagatattagatccacgtacgtagtccaaacttttctgccactcgtccacaacttttatccctacgcggagcaacaacctaatagaggtcacttcacaaagctatatagctttcttcgccattctatataggtcgtcatcgcgacctatatagcttcgtcgtcggaccaatatagctcagcccgccgacctatattggttgatagctctcccttatattcctccccatttctcggcaagggaagaggtggcattggggggctctataaatgcgttcgtaaaggaattaaagaacagcgtatctgtgccttctgaatggagagtacacttgtgataagggctcttggcgtgccctcgggtggcggagtgttagttgttggggaaataatattttttgggtgaacggatcgcgtgatcctaattgcagtcattaataccccaagcgtatgaaaaagacgatactgcgtgtggcgatgagtagcctctttcttggcttcgtcactctgagtgcagctttcctctcctcgtgtgataaggagaaggagagatcagagccgatatctggctctttcccctcgaagcaccccatctcaggcttcttccgagtgattaaggctgaggcaacccttacccctgtggagaaaaccccacagaaagatcgatcagattacctctgctgggagattgtccctggatcagaggtccgctattcgatcatacgtgatgaggagaaggtctcgcaaatatataaggagcgtaagatgcgtgaggatatcaccttctacagcgtgattgggccgttcaatacattgggtgtccatgggctgcaggccatgacgctgagctttactcgtgacgcagatcatgtggtgacggatctctcctcgcaggcactactcagctacgagcacctgtataagacgtactatgagcgtgagccactcgcaccaggtgctgagacttggtattataggtttttagctcatgaagttgggcctaagactgttcgagaagaagcgagcttggcaagtcttactccaaaggacctttggtggaccttctgggggtactacacaaggctgcctatgggagaatttgtcctcacccctcgtgaagcctctgcctatctctatctgaagaaggatgctgtcgacttgacggcgggtaagctcgtcctcacatttgtccgtgacgaaggaaatcctgtgaaggtggagcttcccacaaagtagcctctttgtccgtcatagatgctcccgaccagtgccttctggaggtgctgggcgggagcgtctgtatgaagaagtgtcgggtgggggagcttatgtcggtgatttttattacctttgtggcaaagagatgatcgagagaggaggcgacagagcttcctctctttgcattcatcccctattatcctacgagacgcgttatgatcgataagagctatatcgagggaattgcctcccagtactgtgccaccgagcaccccgattattatattgtagaagtcgctgtccaccctggcaatcgtattatcgtcgagctgggtgcccgtgggggcatcagcatcgatgcatgcgtagccctctcgaagcatatcgaggggcagctggaccgtgaggcagaggacttcgagctcgaggtgggctccgcaggcctcaccgcacccttcaaggtcctccgtcagtacaccgacgctatcggtgaggaggtcgaggtgctccgtaaggggggcatcaaggagaagggcgtcctctctgacgctactgccgaagcgatcaccctcaccgtcgtacgcaaggtgcgccccgagggtcagaagcgcaagatcgaggtcgaggaagccctccccatcccgatggatgaggtgctacagaccaagcgcgtcttgaagttctaaatcctcatcctatcccagtagaagaataaacctatataatagccccatggcaaagaagaaagagactaccagcttgatcgaagcgctcctcgagtatcaggagctcaagagtatcgaccgcaatacgctgatcgcggtcatggaggattccctccgcaatgtcctgtcgaagatgtttggctcggacgatacctttgacgtcatcatcaacgtcgagaagaagggtgacttcgagatctggcgtacgcgtcacgtcgtcgccgatgaggacttcgtcgatgaggtgcgtgaggtgcccctgagcgaagcccagcgcttcgactcagaggtctccgtcggcgaggatttcgtcgatgctgtcgacttcaactccttcggtcgccgcgcagtcatcaacctgcgtcaggccctggcaagcaagatcctcgagctgcagaaggagcacttctaccacagcttcgtaggccgtgtgggcgagctgatctccgccgaagtctatcaggtatggaagcgcgaagccctgctcatcgacgatgagggcaacgagctcctcatgcccaagaccgagcagatccctggcgacttcttccgcaagggtgagaccgtacgcgctgtcatcgagcgtgtagagaacgagaacagcaatcctaaggtcatcctttcgcgcgtcagccctgagtttctcaagcgccttctagagctcaacgtgcctgagatcgccgatggccttatcacgatccgtgccgcagcccgtatccctggtgagcgtgctaagatcgccgtagagtcgtatgacgaccgcatcgaccccgtaggggcttgcgtcggggtcaacggttcgcgtatccgcagcatcgtccgcgagctgaagggtgagaacattgacgtgacgacctacaccacgaaccccatgctcttcatccagcgcgctctcagccctgggaaggccgtggctatcgccctctgcgacgaggacgaagaaatcaagcaggccgaggtctacatgcgccccgatcaggtgcccttggctatcggtaagaacgctgccaacctcaagctggcttcgctcctgaccggctaccgtatcgagatcttccgcgacgaagagggtgctacgggtgaggaggatatctacctcgacgagttctctgacgagatcgacgagcagatgatccaggccctcaaggaggaaggctacactacggctaagtccgtactgcgtgaggatcgtgctacgctccttgcgaagactgagctggacgaagacgtcctcgaccgtatcctcgaggtcctcagcgccgagttctccgaagaagagccctacgaagctgacgagcccgccgctgagctcgccaccgaagagggagaagaagactaatccgtcccgcccgcccgctgcccagctgtcgctccctgtagtgtagatacccattagcgagaagcccgagcaagccagcagcgagcccgtgaagaggcggacataaaccattcaaaagagaagatacatgccaaaggacatcaagctctttaccttggccaaggaactcaacgtagggattggctcattcaaggattcgttagagaagaagaacgtcttagacgtcaatactatcacccccaacactcgcgtaccccgcgaggtggccgagcagctcatcgctgagcacggcaagggcatgggcaaggctgagatcgccacgctcctcgacaccctcagtggtgccgctgctaagcctgcgcctgccaagcctgctgctaagcccgaggcccccgctgctgagcccgctcccgcgaaggtgaagcacatcgagacggtcgtccccgaggatcgccgccccagcctcaatatcaagggctccatctccacggagaagaaggctgaacccaagcctgctcccaaggcgaaggccgagcctaagcccgctcccgctcctgctcctaaggccgaggctcctgcacccgaagtgaagcccgagcccaaggtagaggtcaagcctgaacccaagcccaagcccgagcctgctcctgcacctgctcctaaggtcgaagctcccgcccctaaggttgagcctaagcccgaaccgaagccagctcctgctcccgagcctgcccctgcagcgcccgaggttaagcccgagcccaaggctgctcccgcagctgaggagcccacggtacgtgagcccgagatcttccgtccttccacgccaagtgcagggatcagcttcaacgtagtaggtaagatcgacctctcttcgatcaacgataatacgcgccctgccaagaagtccgctgccgacaagggtcgtaagcgcacccgtatcggtaagggccccgtcgatgtcaaggccgaagccgctaaggtgacggacaacggcacgaagaagcccggacagcgtaatggcaatggtggtaatggtcgctccgcagaccccaacaaccgcggtggtcgtggcaatgcccagcagggtgctgccgagcagaagaccggtcgtaaggctaagcgtcagagccagcagcctcagaaggctgtcgtcactgacgaagatgtacagcgtcaggtcaaggagacgcttgctcgtctgacgggtaagaaccagcagggtgctaagtccgctaagtaccgtaaggacaagcgtgacgccgctcgctctgcagctctcgacgctcaggagcgtagcgaagccgaaagccgtacgctgaagctcactgagttcgtgacggtgagtgacctcgcgagcctcatggacgtccccgtgacgcaggtcatcgctacctgtatgagcatcgggctgatggtgtctatcaacatgcgcctcgacgctgagaccatcgagatggtcgcagaggaattcggctacaagaccgatttcgtcagcgctgaggttgtcgaagccatcacgcaggaagaagaggtcgatgacgaagctgacctcatcagccgtcctcctatcgtcaccgtcatgggtcacgtcgaccacggtaagacgtcgctcctcgaccgcctgcgcaataccaatgtcatcgctggcgaagcaggggggatcacccagcatatcggtgcctacagcatccgcttcaagggtggtaagcgtattaccttccttgatacgccaggtcacgaagccttcaccgctatgcgtgctcgtggtgcgaaggtcacggacatcgctatcatcatcgtcgctgctgacgacgacgtgatgcctcagacgaaggaagctatcaaccatgccgccgccgctggtgtgcccatggtcttcgcgatcaataagatcgataagcccggcgctaaccccgaccgtatccgtgagcagctcgctgccatgaactacctcgtcgaggaatggggtggtaagtaccagtgtcaggagatctccgctaagcagggcatcaacatcgatgagctgctggagaaggtcctcctcgaagctgagcttctcgagctcaaggctaaccccaagcgccgtgcagtcggctccgtcatcgagtcttcactcgataagggtcgtggctatgtggctactgtcctcgtgcagaatggtacgctctcgcagggtgacgtcgtcctctcaggtacgcactacggccgtgtgaaggctatgttcaacgagcgtaatcagaaggtcgagcacgctggtcctagcgaacccgttctgatccttggcttggacggtgcacctactgcaggtgagaccttcaatgtcatggagaccgagcaggaagcgcgtagcatcgccagcaagcgtgagcagctcaagcgtgagcaggataaccgtacgaagaaggggcttaccctcgacgaactcgctcgtcgccgtgctctgggcaacttccaggagctcaatgtcatcatcaagggtgacgtggacggctctatcgaagcgctctccgactcgctcatccgcctctctacggaggaaattcaggtcaacgtcatccacaagggcgtcggtcagatctccgagagcgacgtcgtgctcgcctctgcttcttcggctatcatcctgggcttccaggtgcgtcccagtcaggccgctcgtcgtctggcagaccgtgagggcgtagagatccgtacttactcgatcatctacgacaccatcgaagacatcaagtctgctatggaagggatgctttcgcccgaaatcaaggagaatgtcgtggccaacctcgaggtccagcagaccttcaagatcaccaaggtcggtaccatcgccggctgtatggtcgtcgaagggaagatcaagcgcaacaacaagatccgcctcatccgcgatggtatcgtcaagtaccagggcgagcttggctctctcaagcgctacaaggacgatgctaaggaagtcgtcatgggtcaggactgcggtctgaatatcgatggctacaacgacatcatggtcggtgacatcatcgaggcctacgaagaaatcgagatcaagaagaccctcgactaagtcgcggtcaacttcactcacgatataccaatagacattacgccccaggctgcttcggtagcctggggcgtaatgcgtttctgcactatctgtgcggtggcttttgcgaccagtactggtcgctgggttgaccagtactggttggttatagcaaccagtactgcttcgcgtcgtgaccagtactggtcagatgagtaaccagtactggtcaccgtgacgattaatataggtccacaccgcttgctgtatggcgtcgtgctacgacgggcttcggggggggggggcgctgcttgagaggagggaggtgtttccttgtgtggggtagggtcgctctacttgctctacttgttgatgctcaattcctctatgatctcgtcaagtttgttgatgatctcttgggcgacacttgtcttcatcgcggggaagttctcggctgagtaccagtttggtgtcgtgaggtactcccatcccataggatattcaggactttgcttttctaagcaagcaagttttttcgctccagtcacctttgagtctatgcctatccagaggttcatccaccagccatagttcgattttttattttcgctatctgccgatatgatgatagagccatcccagccctctttacggaggcggattttaggctcttcttcattatacgaagactcactatcatcgtacaaccagcccttttgatcggcatatttctccagtttggcgaagatgtacttctctctaattccctcagcgattgcatcacgtttgcttgatagcgtggccactacttcggggtgatcaactgcaagatcaatgattgtctggatattctcttgattcatatcttgataggtgagttgcttgatagttcggatatactgattgagagactctcggacgaggggcttgttgtcggccagtcgcacgcattgctccagccagcgaaggatgtcttctgcgtacgataggcgcaagtagcctacttcctcagcgcttttcgtggctgtgctctctttgctggcgtcgtatccatatagcgtgagataaaccaagagatatccgtctgcaccaaaagtctccttcccatagttatcatagcgaatcagttgcttgtcttgatccccagcgtaaatcttgttctctatgatgagtccgtagcggctacttttcacgaggatgtcaatgcgcccgccggtgtcgcctactatggggcctgtataatactctgtatagctatccgggagtgtacagtcctcgaaagggtaggcgaggtccttcagtgcgatctcaaagaaagctcttaggaaggcatcgccgcatccgtggcttcccttggggtcgagtagattagcgattagggcggagtgctttaattcgtagcgctctatgctaaggatgctaaagagattgtagttttcgcctttgcgatttcgctcctcctgctgcgcttgttctaaggcgcagatgctcgctacctcttgaaagaatcgctgtatatccagctctgtgtccatacttatttggggttgtgatgattgtctaagtctgatatccttgctcagccagagggggcggggtacagactcctactcgatgggttcgcttacctgtatttgcaataccctctggctgcaaatgtacgagtttcgtacgagtttcgataggatagggtgcgggatcctgtgcgctgcgtgtgacttcatctgggtgaggctgtcggaggtatagaggtcgcttggtttcctgccagataaaggtgttgggatagcatttatatgtgtttcgtaagtggcttgcccttatggtgttatgttgtgtcggtgtgaaggggcttttgcaacccatattggtcgtcgggtggatctatataggagactgttgcatatagtcctaccctctattgagagagctaaggcatcgcacgcccagctccccgatagcctctccgaagcgagcaagcaagccctgcgccttatcgcgagtattcctcttatccagctgagggaaaagtgtcattctcgtgaagaaaaaagcgccttcccgtagtggtattcttctatctatgcacgtagtcttaaagaccaggcacgtaaatctaattatccacgtacgaagttattagagccacgtacgtagcccaaacttatctgctactcgtccaaaacttttatccctatgcggagcaacaacctaatataggtcacttcacaaagctatataggtcgctgtgacgacctatataggttcgtgcgctgaccaatataggttcatagcccttactgtgggactccgtggtgcggcaggccgcggtgggggcttctttggtggagggagatgttgccctctgtggggtaggggaagagctcggactgaggatgtttcttcggtgaaagtcaagggagtgcaaggtgttgtatcagatatttttgtatctttgtgaccgaatttcctatgtagggtaggagaagaagtctatccctccgccgtggagcgggtggcaccctacggggctaactttttagttatcaacgataatgtacgtcatcgtagacattcagggccagcagttcaatgtagaacagggccgtcgcctcttcattcaccacgttaagggtgcagagagtggcgcagtagtagaattcgacaaggtcctcctcgtagacaaggatggtgctgtcactgtaggtacgcctgtagtggctggtgctaaggtcgtgtgcgaaatcatcacgcctcttgtaaagggcgacaaggtacttgtcttccacaagaagcgccgtaagggctatcgcaagctcaatggccaccgccagcagttcagcgaagtcctcgtcaaggaaatcgtagcgtaagtaattgtatcaccgcattagtttagacataagacaatggcacataaaaaaggtgtaggtagctccaagaacggacgcgaatcagaaagtaagcgactcggagtaaagctcttcggtggtcagcacgctaaggctggtaacatcatcgtccgccagcgtggcacgcagcatcacccaggtgcaggcgtaggtatcggtaaggaccacacgctctatgcactgatcgacggtaaggtggtcttcactcgcaagaagaacgaccgctcgtacgtctccatcgcggctgaagcctaagacggagcacacgtcagacaagtcaaccggaggttgctccagaagggtctacacagcccggagggagcgacctcctctcattataccccacacgagacattatgcttacactcaagcaaatcaaggagaataccgaggcggtcattgagcgcctccgcaagaagcaattcgaggcacgcgaagcgatcaacgaagtactgaacttcgatgagatccgccgtcgctctcagcaggagctcgatgccagtctctctcgtcagaaggccctcgctaaggagatcggtgatctgatgaagcagggcgccaaggagcaggccgagagcatccgctctcaggtggcactgctcaaagaggcaagcaagagccttgaggagaagaaggccgaggccgaagctaagatccgtgagatcctgctctctgtacctaacctccccgccgacatcgtgcccgaaggcgctacggctgaggataacgtctgcgtcaagaccggtggcgagatgcccgcactcgatgctaccgccgagccccactgggagctggcgaaggactatgacctcattgacttcgagctgggtgtgaagatctcgggcgctggcttccccgtctataagggttatggagctcgcctgcagcgcgcgctcatcaacttcttcctcgacaatgctcgtgaagctggttacctcgaggtacagcctccctacgtcgtcaacgaagactcaggctacggcacgggtcagctccccgacaaggaagggcagatgtaccacgctacggcggacaacctctatctcatccctacggctgaggtgcctgtgacgaatatctatcgtgacgtcatcctcgaggagaaggatctgcccgtacgcaacaccgcttactctgcctgcttccgccgcgaagctgggtcgtatggtaaggatgtgcgtggtctgaaccgcctccaccagttcgacaaggtcgagatcgtctgcatcgacaagcccgagcgcagctatcagcgcctcgacgagatggttgcctacgtagagacgctcgtcacgatgctcgagcttccctggcgcatcctccgtctgagcggtggcgatatgagcttcaccagcgcgctgacctatgacttcgaggtcttctctgctgcacagaagcgttggctcgaggtcagctccgtatccaacttcgagagctatcaggccaaccgcctgcgctgccgctatcgtgacgctgagcagggggtccagctcgtgcacacgctcaatggtagtgctctggctctgccccgtatcgtcgcagcgctgctggagaacaaccagacgcccgaaggtatccgcatccccgaggctcttcgtccttacacgggcttcgacttcatcccccgtcctacgaagaagtaagcgacttcctcactcggacgctacaataaaagctcatccccacactgccatcaggcggtgtggggatgagcttttattgtagatgcgaatgattcgctgggcttacttagcgtcggagtagatctgcttgatggtctcctcgatctgatcgggagtgagatcgcctaccgtctggatgggcgtaccctgcatagggatgaagaggcacatagggatgctcttcacaccgaagatattggccagaccagcttccttgtcgacatcgatcttgtagacgtcgatcttacccgcatacttcttagcgatagcttcgagcttggggctgagcttacggcagggaccgcaccagtcggcgtagaagtcgatgatagcgggacggctgcccttgaagacgaacttcgagggctcttccttataatcccagatgtacttgcgcaggtaggctgcgtcgatgtgcttgatagcgccttctgcggccttgtcgtcggcggcagtttcttcgctgggggcagctgcggtcgtctcggtggaggcagaagcagcgttgctcgaagccttggctgtgcaggcatagctcgagaagagacctgcggagatgagggcgaggctgaggatgactttcttcattattcagttagttgctacgaggtgatagaatactgctcgttggtatgataagcgtgagatggggcgaattgttcattaagcgacaagccgggcatcctcagatggggagggtgcccggcttgctatatgaagtgggggagtgctgcgaagtgcttacttcttagcctcggtggagcggaagaggatctccgtacggtccttagactcgtagagcttctttgcgagagcctgtacagactgaggtgtgacagcgtcgaggagcttgtcgtagttcgtgacgaagtcgaagccctgaccgtagaagcgagcgagctgaccgagccagtagctgttcttgcggaggctttcgccgtgagccttcttgaggttcttgacagccttgtcgaagtactcggcagaggggccgttcttgacgataccttcgagacccttgaagacgagctcgttcatagctacggccttagcggggtcagtctggaactggacggtgacgttcgtgcgtgggctggggaagcgtgatacgtcagccaggacaccgacgctgtaggcaccacctgcatcctcacgaatggtcttcgtgtagagctggtcgaggatggactcaagaacagcgctcgtcagaccttcctgctggctgtaggtcgtaggtgcagagaggccgtcgatgacgatacccataggcgtctccataggagcgctgtactccttcttgttcgtgccgaggcgctctacggggactcggttcgtgtgagccttgtcggtgtagaccttctgcgcggggagtgaagcgatgtactgctctacgagagggcggagggctgcttcgtcaacattacctacgaagtagaactcgaagccgcgggcgttagcgaagcggctacggaagagctggagcacacgatcgtagttcacgctcttgacttcttcgacgctgagtgggtagcgctcagggttgttggggaagatgtagcgcgtgacggagtcgccgaggaaggagagagggttagccttgcttgcctcgatctggctgatggtacgctcctgccatgcctggaaggcgtccttgtcagcgcgtacagctgtgaagttgaggtagaggagctggagcatcgtctcgaggtcttccttcgtcgtgctacctgctacgtcatcgctgatgttggagaccgtcgcagagacagaagcgatgcgaccgctgagggccttctcgagagctgactcatcgaacttgccgagaccaccgatggtggggaggctgttcaggaccttcagctccgtagcgctgggcttggtgaagttgtagtacccaccatcgcggcgacccttgaagaggatctcatcttccttgtagtcggtcttcttgatgtagaccttcgtaccgttggagagcgtccagatggtagagccgtactgaccattcttctcggtcttgacgatcttacccttcatggggagcttgtcgatgagcttctcgttgctgacctcgtccttgggagcttcgacctgctgcttcgtgtagtcgaggtacttctgcgtgagctcgtcgatgctggggagcttgacgctgggcttctcgacgctggtcagagcgacgagtacattcttctcgaggtcgagctgctggaccatagcattgatctgctcgagggggaactgctctgcgatgccctggatgagctggtagtgcgtggggatatcgaggaggtaaccaccatcttcgaagtagtctacatagacgttcgcccaagcgtcactggtgcgcttgtcacgctcgttgtagaagttcttcataccgacgaggtagtccttcttggcgcggctgtattcaccaggagtgaagccgtacttcttgaggcgtacgatctcagctacgagagccttgagagcaggctcccactgaccttccttgaaggtagcgtcaaagctggcagcatccttggtcttagcgacgacgtagttgccgaagtcaacggaggcgttgacgaagggtgcattaggcttcttgacgatgtcgctgaagcgctgggcgatcatcgaagtgacgacacttttgatgtagtcttcgaggggacccatgagagtagcgcggatatttggaggcgtgatatcgctcttataagagatgttgatcgagttctgcgtagcttccttgtcagcagcgatacctacgatgggcttgtcgttgtcttcgacagggatgtagacacgctcagcagcattcactggagcagggatgtcggcgaagatcttcttgatctgagcctccgtgtagttgacgtcgacgtcaccgacgatgatgactgcctgcaggtcggggcggtaccacttcttgtagtagtcgcgcaggacctgataggggaagctgcgtacgatctccatcttaccgatggggaggcgcttaccgtacttgttgccagggaaggcaaagtcgaggagcttctccatgttgcgcatatccccgctattgctgcggcgccattcttcttcgatgacaccacgctcagcgtcgatctccttatcctcgaggctgatgaagctactccagtcgtggagtacgaggatacagctgtcgatgatgctcttgcgtgggacggggatcttcatcagcgtgtagaccgtcttgtcgaagctcgtgtaagcattgatgttgccaccgaagctggcaccgatgctctcgaggaagttgatgattcccttgcctgggaagttctttgtgccgttgaaggcgatatgctcgaggaagtgagccagaccctgctgcgagtcttcttcttgcatcgagcctaccttctgggcgatatagaattctgctctacccttgggctcttcattgtgacgaatgaagtaggtcagaccattggggagctttccgatacggacggcggtgtctatggggagtggtggcatttcgctgggggcttgggcttgagcagccgaaggcagacccagtgtggtgcctacgaagagcgccgagaggagggataagatgattttcttgagcctcatcgcttgtttgtggtttaagaggtgaaaagatatttatagttcactgtaccgcaaatgtacgataattcttcggtgtgtatctactatatgagatacctcacgcgcgcaggtgcctatatattaggtatatgggtgcgtgagtagagctatataggatggcgaagaaagctatatagctgtggactgatccctatatagctttcggtgcgaagctatatagttttgtgacgtgccctctattaggttgttgctccgcgtagggacaaaagttgtggacgagtggtagaaaagtttgggctacgtacgtggatctaatatctacgtacgtggatatttggactgacgtacctggtctttaagactacgtgcgtagatagaagaatgtcactacgtgaaggcgctttttcttcacgagaaggataattttccctccgctggataagaggaatacttgcgaagggacgaagggcttgctggtcacttcggagaggtatatcggggagctgggcgtgcgataccttagcactctaaatagagggttggactcgcggcaacagtctcaatagtggtatgaggtatgatcctatattggtcgctgaagcaacctatatggggccacttaatccctctcggagatggacttccgctatccgcggggaaaggagctatatacgagggttgaaaagtgggggaaagaaggggaggataaggccgtgtcagtatggcataatgtcaggtgcttgccgtgaagctgtccctcttttatctgaggtataggcttttttaagtatatttgcacgatatattacctatgtcataaagtgtccactcaatagacccctatgttacttcacaaagaagggcgcggcccgctcattggctttgctatcactcttatcgggctgaatgccttcattgctctctttgcgggagggacgtttagctacatcttcctggctatttcgatcctcttctatctgactgtcatcaacttcttccgctacgagcctcgcaagcacagcgatggcccgctggagatcgtgtgccctgctgacggccgtgtcgtcgtcgtcgaggagacggaggagacggagctgcttggctgccgctgcctgcaggtatccgtctttatgagcgtctttgatatgcacgtcaactggattccttgtaatggggtcgtcgagcacgtctcgcacaccgatggtcgcttcctctcggctcacctgcctaagagcagcacggacaacgagcgctcagctgtcatcatccgcacggagggtggcgatcgcatcctcgtccgtcaggtcgctggggctatcgcacgccgtatcgtcacctatccagaggtcggtcagcgtgtgaatatcaaccagaacctcggcttcattaagttcggctctcgtgtcgacctctacctccccctcggcacgaaggtgcacgtcaaggtcgggcagaaggtccaggggaacatcaccgacatcgctacgctgcctcgctaagcagtacagcacccctccctatacatatatataatagtaggaatgaatatcaagaagcatatacctaatatgctgaccgcggggaacctcctctcgggtgtgctggctatcgtcttcacgctctacgcaggtcgccccgatatcgctatgtggctcatcgtcctctcggctgtttttgacttcttcgatgggatggtagcacgcctgctgggtgtgtcctctccgatcgggaaggacctcgactcgctggccgacgtcgtgagctttggcttggctcccgctacccttgtcttccgtggactggagggcctggatgctgggaattatctgaactatggcgtcttcgtcgtcgtagcctttgctgcactgcgcttggcgaagttcaataacgacacgcgtcagtcgacctcgttcctcggacttcccgtcccctcgaacgcgctcttctggatcggtgccgcagctgcgattccttccttcgggctgtctatcggtgcttcggctacgctcatcacttatctggtgctgacgctcgtgctgtccctgttgatggtcagcgagctgccgatgttctccttcaagctctcgaaggagcccctgagccacaagtggcctcagctggtgctcatcgtggtggctgtcgggtcggtcgtgtggctgggctggttcggctgcagtgtgacgatcatcgcctacctcctgctgtcactccttcctcagcagaagggcgagaaggcctaagcggagtgctgtggcacgctctttgaaagaggagctttgtcacatagtatgtattagataaatccgaatttcgatatgagcctcctgataataatcctcatcggtgtcctcctctacctctactggcctacgatccaagcttggcttgccgtgaagcttctccagcgcttgcagcgtcgtatgaccgaggcggccggtggtgaggcctaccgcaatcgtggctacggtgcccctggggcatcctctgagcgtcgtgaaggcacggcagagagctcggacagccgccagaagcaggagctcgatgatatcgaggctcgcaagttcacccgcccctcaagcgacgagtacgttgatttcgaggagcttccacgggactaagctgcactctgcgggtactccatacaccgtatttacatacgctatccgaagcagtgggataggggaagtgcgcttcccttatcccacttccttctgagaaggccctttgtatttgagtattcgtcggagtgtttgtatctttgttcctcaaagactgaaatataaacactattcatccataggtaacaacaaacaatggcagtattagagaagatccgaagtcattcggtactgctggtcgtggtcatcgggatcgccctggcgggctttgtcatcggtgacctcttcaccagtgggcgcaccttctggagcaagaatgagcgtacggctctctccatcgatggcaaagatgtctcgatcgaagagtatagcatgcgcctcaaggagctcgaagaccaggctcaagcccagggccagcagctctccgatgagcaacgcatgcagctgaataaccaactggctcaagagtacatctcggagtatgccctcaatgaggtgacctcaaaggtcggcctcggcgtatctgacgacgaactctacgccctcctcgtgggtaaggggatcgctccctcgccattggctgcacagttcttcggctcggcagatgagaagcagatcaatgagatcatcaagcagctttcggataagcagatccaggcagctcctgctgagcagcgtggccagctcctgcaggctaagagccagtttgagcagctccagaagcagatcaagtctcagcgtctccagcagaagctctctacgctgctcgctcgtacctataagatcaacgatgtagaccgtgagctctccgtcggtaaggaaagccgtagcatcgctctcgtgcgcacctctgctgctcagatcgcagacgaggctgctaagcccagcgatagcgaggtgaagaagtactacgacgagcacaaggacttctacaagatgcagtaccctctcaccgaggtgaactacatcagcctgcaggtcactccttcgcaggaagactacaagaacgctgctgctgagaaggagaaggctgtcgctgagctccgcaatgcaaatgccgctaacgtcgagtctgtactccgtggcttcgctacctccagcaagttcttctccaagagctacctcaccggtgctgagctcgatgcgctgggcctcggtgctgagcaggtcgccttcatcaagggtgctgaggctggtgccgtcagcgatcctcagctcgtcagcgaccgctacgatatcatcaagctcgtcggtaagaagatggtccctgcaggcgtctctgtccgtatgatcgtcctcaacgacagcgtcaagggtcaggcagacagcctgctcgcacagcttcatgcgggtgccagcttcgctgagctcgctaagaagcacagcatcgacccctctacgtcggctacgggtggccttatccagatgcctaaccgctacggctcggtcgatagcaccttcaccgaatcacagctggtacagctctcccagggctcagctctcaacctcgatacgctctacaaggtacccttcggtacggtcgttcgcctcggccaggctcctctctccgtcctcgtacgtgctgagaacccccagcctgcagtagatgcttatcaggtagcattcctctcggtacccgctacgttctctcctgagacctacaacgctaagtacgctgctatgaaccgcatcctcggtggtggcggtggcttcgatgctatggctaagaaggctgagaaggaaggcttcagcgtagctcgcaacatccctgtgacgacgcagacggctgctctcgggcagatccccagctcgcgtcaggtcatcagctgggctatcggtgctaaggacggcgaagtcagccagaagctctacacctgcggtacggactacctcgtcatccctgcagtcgtcaagcatactcctgctggcgtagctcctctctccgctgtcaaggaagagatcgtagcttacctcaccagcaagaagaaggctgagaccctcgctaagaacctcgaaggcaagaacctcgcttctctcgatgcttacgctacggagctccagacgaaggtcgacaccctcgtcgacgtcaactacctcgtccgtggtagcgagcctgctaccttcaacggcgtagctatgactacccccatgggtaagatctctaagcccttcgctgcaagcaacgccgaagtcatggtcctccagcccgtcgctgctacgcctaacgatcccgctgctgtcgctgcacaggtcaagcagcaggagctcggtctggctcgtcagtacagctaccgtgtcttcacggacttcatccagaagatgaagattcaggacaaccgcgctcgcttctattagtagccggctccccacctatcggggcatcgggacaaccctttgccactgatatcagttattaaataggctgcccgcatgaagacactctgcgggcagccttattcattcacccctcgatttatcagcatacgatgccagaaggcaaagaaatactccttggtcgtaccctcgatgagcttaccgagctggtcacctccctgggcatgccccgcttcacgggcaagcagatagcccagtggctctatgacaagcgcgtcacctccatcgatgagatgacgaacctctccaaagccaatcgcacgctcctcgctgagcgctataccgtcgggcgtacggctcccgtgatgagccagctctcgaaggacggcacgcgcaagtacctcttcgccgtctccacgggggggcttgtcgaagccgtctttatccccgataaggaccgcgctacgctctgcatctcttcgcaggtgggctgtaagatggactgcctcttctgtatgactggtaagcagggcttcaaggggaacttgtcctcgggtgagatcatcaaccaagtcctctccgtcgaggaatccgcctcgctgaccaacgtcgtctatatgggtatgggcgagccgctcgacaatgcgacgaacgtgctgaagagcatctccgtcctaacctctgcgtggggcttgggctggtcgcctaagcgcgtcaccctctctacggtcggtgtacgccgtggccttgagcgcttcctcagcgagacgacctgccatctggcggtcagcctgcacaatcccttccacgaggggcgcctggagctgatgcctgccgagggaggtctgcccctggaggacacgctgcagatgatccgcgaagctgacttcacggggcagcgccgcgtctccttcgagtacatcgtcttcgatggggtgaacgatagcgacgagcatgctgcggagcttgcccgtctcctgcgtggcatcccttgccgcatcaacctcatccccttccaccaaatccctgatgtgcccctgcgtccgctctcgcgagataagatggagcatttcaagcgccagctcgagtcgcgcggctacaccacgacgatccgcacctcccgcggtgaagatatctctgctgcctgcggtatgctctcgaccaaggagcagatggctcgtggcggctctgcaccacgctaacccctcccgcctgtgatcctccagcgtctgcacctcctgcacttcaagagcatcgcctcggcctcctgcaccttctcccccaaggtcaattgctttattggcctcaatgggatggggaagaccaacctgctggatgcgctgcactacctctccttcaccaagagtcacctctcgatcaccgacagcctcgccgtgcaatatgggcaggaggctgccgtgcttgatgccgtctaccgaagcgacttcggcgacgagcgtcagctactcttgcagatccgccctgggcatcgcaaggtgctcaagcgcaacaagaaggagtaccccaagctcagcgatcatatcggtgccttcccgctggtcatcgtctcgccacaggactaccagctcatcctcggggggagcgacgagcgtcgccgcttcgtcgacaagcagctctcccagcaggatagcgtctacatggcggcactggcacagtaccaccgcatactcgagcagcgcaatgtgctcctgaagagccagcgtgccgatgatgccgtcctcgaagtcctcgatctacagctcgagcaggtcagcccactcctctacgagcgtcgtgcgaccttcgtgcgtgacttcattcccctcttccagcagtattataccgctattagtggcgggcaggatcgtgtgagcctcgtctatacgtcgtcgctcgctgagcacgagggccattgcctcgagctcctgcgtgaggcccgtcagcgtgaccgcctcatgggctacacgactatggggctgcataaggatgacctgcagatgctcctcggcgaagagctcattcgcaaggtcgggagtgaggggcagaataagaccttcctcatcgcgctgaagttcgctcagtacgccctgctctcggcgaccaaccccgagcgcccgcttctcctcttggatgatatctttgacaagctcgatgctgagcgtgtggagcgcatcatccgtctggtcggggggagtgacttcgggcagatcttcatcacggatacgaaccgtaagcacctcgacgagatcgtcacaagctggggcgaagactatcgcctcttcgaagtatcctcgggcgaagtgcgctctatcgactccacctatgaagcagagtaagaccgtgctcctcggcgaagccattgcctcgctgtgggacgatgaccccgatatgtatgagcagctcttggtgcatcgtctgcgcgactatctgcctgagctcttagggccgatgtaccgctggcttcaggaggtacgcttcgacgaaggggtgctccgcctgcaggtctcctcgcctgcggtacggcaggaactgggcttccagcaagccgagctccagcgcaagatcaacggccaccttggtgccgagctcgtgcgcttcattcagatttactaaggggcgaggtgatcacttcctccctaagctcttcggctgatctaccgcggtaggtcagcctttgttatgtgcgctcgtctgtgacctcacgggaggggggatgcgaaccagtactggtcgacgaagtgaccagtactggttgctattattgaccagtactacttcgcatcgtgaccagtactggtcacttcgtcgaccagtactggttcgttttttaccctcagcaagaagttttttttgagcgtggcaggatatttctgtgtggtggtaagtcgctgtgtatgatggggtagtgctttctcttcgctcgggtggatagccctccattgaggggtgtcgtgcggggatttttgaggggcgtgatttggagttttcaaaaactgatttacctttgcaccaatcggaaggacgtccgtcgtggataattcaccttcctcccttcactcaaaagaaaagaagactaatagctatatgcaacaagtccagtctatgatgattatgcgaatgtatgctgacacgatgatgtggctcagcatgatgacgcatatccataggcgaagtagcttgttgtatacctgttagtatatagcatacccatacaaagagtttgtaagaagcgcttctcctggatttcctcgagaagcgcttcttcgttgtatatattcacctccaaattcaccaattcactaatgagaaagagtttactaagcctgttgctcctggttctctccgtaggacttacctgggcacagaagcaggtagccgtgactgggatagtcgttgcggctgagaataatgaaccgatcgaaggtgcttcggtcatctgcgttgagcacccccgcagtggggccctcaccgatgcgaaggggaagttcacccttcgtctgcccgagggagcgaagaccctgcgtatctcctatattggttatggcgccgagacggtcgccgtcgtagcaggtaaagagcttcgcatccagctcaagagcacggagaagacgcttgatccactggtcgtatcggcctacggtgtccagcgcaagtcctccctcacgggcgctacctccagcatcaaggccgcagatctggcaaatgccaaggtagagtctatcgataaggcgctctcgggtaaggtctcgggtatccgcgtcgcttcacagacaggtaaccctggctcagctggtacggtgcagatccgtggtgtcgggagtatcaacgggactaccgagcctctctacgtcgtcgacggggtgcctgtcacgacggggaactatggtatcggcggctattcatccaatatccttgcctccatcaaccctgaggacatcgagtcggtctcggtgctcaaggatgctgcttccgcttcgctctacggctcacgtgctgctaatggtgtcgtgctcatcacgaccaagcgtggtaagcagggcaagacgagctttaacttcaagggcaataccggcttctcgcgtatcgctaccaattccttcgagctgatgaatgctaacgaagccttcgactaccagcgcgaagccctcatcaactacgagctgtaccgagctgatgctctcctgcccacagggtcgcagtacgctcagcgtgctacgctccgtcagcagctcgaggcaaagtacaccgatgcagctgtcacggacgaagatctcctggtgaagagccgcacgaccgctaccgactggcgcaaggtgctcttcggtggtacgggccgtctgagcgatgtcagcctctccgcttcgggcggggttgatgctctccgctacttcgcttcgctgggctacaataatgtgacgggggtcacgcccttcggtagcttcaagcgctattcgggtcttctgaacctcgacaataaggctactaagtggctcaacctctccttcaaggggcaggtctcctacacctcacaggagggtagtggtgacaactctggtcagagtggtagtgtctcgctctcgcagcctacgatcctaagccttctctcggctcccgaccagcctgtatataatgcggacggcagctacaatcagaatgtcgcacctatgaagggtacggacaatcccctccagatcctcgaccccacctacatcacgaatcagctgggtacgctccgcggtatcggtggtgtcaatgctcaggtgaccttcacggattacctcaacttcaagacgacgaactcgatcgagtacacgctcctcaagagcttcgagtacgtaagccccaatacgcaggacggccgtcgtatcggtggtcagggtacccgcttctccaatgagcttgtcgtcaagacgacctctaatgtcctgaacttcaaccgcgacttcaccaagcaccacgtcgatgcacttgctggtatcgaggctcagagctttgaccagctccgctatggcttcgaggtgaataagtactctacggataagctccgtgagctcggcaatgggcaggtcgtcgatagtgagagcaatcgctacgggagcttcctcctctcttacctcggtcgtgtcaactacagctatgaaaaccgctactacctcggtctgagcctgcgtgatgatatctcctcgaagctcggtaagaacaagcgctcgggtgtcttctacagcgtatcgggtgcctggagatttggccgtgaagccttcctcaaggacaataacttcctgaccgatgctaagctccgtgcttcctatggtaccaatggtaacctccccgacgccgagtacagctggagaggactctacaacttcggtggtaactatggctctgagtccgctatctacctcaatcagctggctaacctcgacctcggctgggagaagagccgcagcctcaatgtcgggcttgacctgaccttcgctcgccgcttcgctctgagcgtggagtacttcaataagtacacgaccgacctcctgatgtccgtacctgtctcgtacaaccacggggtagcgaactatcaggccaaccgaggtgagctctctaaccgcggtatcgaagtcgagcttcacgcatcgaacatccttaactccaacgccttccgctgggatgctgacctctcgctgacgaagatccgctcgcgtgtagaggcgctccccaatggcgacatcatcacgggtgctggtaactacctctaccgcccaggtgcagacatctatacgttctacctccgcaagttccacgacgtagagaaggagacgggtctggctcgcttcgtcgtcgaccccacgaaggactccacggctgacaacctcacctactactcttcggaagctgccttcacgcccaccgagtcggcctatcctaaggtctatggcggtctgacgaataccttcagctatggcggcttcacgctgagcacgctcctgacgtaccagttcggtgggcacttcctcgaccacttcgatgccttcgctatctcggacggggctcgtacgatctcggtgaactccagccgtgagctcgtagggaactactggacgcctgccaatacgacggcctccaaccccctgcctatcctgaacaatccgctctcgagtgcacgtctggcgtccacgcgcttcctgcagtcttcggacttcgtccgcctcaaggaagtagcactgagctaccgcctccccagctcgctcaccaaggcactccacgtcaattcggcgagcgtatctctgacggcgaacaacctcttctatctctacgcagctaccaagaataaggagctcgagacgcctctcaatggtttccgtacggccgatatccctgctctgcgcacggtgagcttcggtgtgaatgttggtttctaacgcttatcccagtatccagatgaaaagattcccattatatatcctgctggcctcctctgtcctcttcacctcctgtgagaaggaactgaatcagctcccctcgggctctctgccctctgagcagtctatctcctcgctgagtggccttaccagtgccgtgcgtggcgtctattcgcgcctcaatacccgctatggctacagcggtgagaccgctatcttcgccgatggacgtggtggcgacgtgaagatcgtcgtagggagctacaatcactcgacggctatccaccagttcctcaccgacaagtcttcgggcttctcggctggggcttaccaagccttcgccacgacctccagccgtgtcaatgacatcctgcagtatgtaggctcggtagagaagaccctcgcctcatccgaaaaggctgagttcgacgaccaggtagcgcagctctatgcgctgagaggtctggcacacctggagctggcacgtctctttagccatatccccaccacgggcgtgaacctggatgcggcctattcgggtattcccttgaacaccgccgtacatcccgttggctaccgcttccagcgttctacgctccgtgagacctatgcgcaggtcatcgccgacctgacgaagtccctcgaagggctgagcaagaataagacgctcaactcgggcgctatcaactactgggcagctgctggcctcttggctcgtacctacctctacctcggtgattggcagaacgcctacaagtacgccagcgaagtcatctcctccagcccctacacgctctacagcgtagcagactatccctcggtctggggcaagcaggggacgtcggagtccctctttgaggtgctcaccacggagaagtccaacgcagggctcaatagcctcgggggctataccaaccctggggtgtaccctgagttcggtgctgctgatgacttcgtcacgtgggtgcagacgacccgctccaatgacgtccgcgcacagctcatcagcgagcgctctaaggtaggtggcgtagcgaaggcctactacaccacgaagtacgtgggtcaggatggcgcttcgaacgctacggcgatgaataacttcaaggtcatccgcctctctgagctctacctcatcgcttcggaagccctccttcgtggggctacggcgagcgacgggaagacggcagtagactactacaacacgctgcgacgcaaccgcttctccagctatacgcctgctacctcggtgacgctgcaggatatcctcgatgagcgccgtatcgagttcttctgcgaaggacaccgcgcctttgacctcctgcgcaataagatcaacctcaccagccagtacgtctcgggtggtacggtcaactaccttgactggcgcaccatcgtcgagctccccgagcgcgagaagaacatcaatccggacctcgtagtccgtgccgcacagtaggcttacacgctctacttgttagtgaataaggagacacgcccccagcagcctcggccgctgggggcgtgttgtatctatatccttcggaagggtagtgtggtacgaacctatattggtcggcgggctgacctatatagcttcgcactccgacctatattggtcgcatccgtgacctatataggtcagcccgccgaccaatataggttcacgcaccgccttcatagtgcttgctgcttccctctccgtagatggcgtattcatagggacttgtgttggagggatgatggggcagtacggaggggcgaatgagggggctatggggaagaatatcccgaggcgtatgagtgaagcgcggaaaggtgttgttattcgaagtctttttcgctaactttgaggtgagggttacgaaggactcccttagtgctcttaccataactcatgtcacactccccctcgggggaactaaaagctattcaactatggacatcagaattcaagccatccacttcgatgccacagagcagctcaaggcctttatccaaaagaaactcgagaagctgacccgcttcgccgacgatatacaggccgccgaagtcgtcctaaaggttgtcaagcccgaagtatccaataacaaggaagcctccatcaagctcaaggtcaatggtgcagacttctttgtcgacaagacaggcaacagcttcgaggaatctgtcgatctctgtatcgacgtcctgaagcgtaagctcgagaagcacaaggaggcctaagcccccagccctcgccttgagggcgcaaacgactaactcttgcccccactgagtcccctcagctgggggcaactcatatatatagtagtacttgcctccagcagcttcctcgcgaagcactgctcgctacctgctggagtgggtagggtaggaggcgtggaaatagagtgagtttcgcgcccttgcgagggggcaagtcgttcgtgtataggtgcttgagtataaatgctgtcaaagtgttaggactgcagtgcacgaagtggtatcacgtaatgctttaatgtgtatatttgctactacaaacgacgacaaagcacatggacgaaagacgcatcgcacgtattcgtgagatggagaccgcactcaacaaatgggtggacctcggcaacaagggggaagaactccttgaggtcatgacggctcatctccccagcctggagcgtctcgtcgcctactacagctcccccgactggatgcgtgaccacgatgccagcgatgaggggctcctccccgcagatcttcctcacggcgtcctcagcgaagatgccgtcttcgacctccttacacagctctatggcttgtgcgggatcgtgaaagacatagagcagcgcctcggaaagataccttagagaaaagttagggcagtagcacttccccagccctggagcggcgcactacccccgactatatagtacacaaacaactacattaagaaaactatgcagcagtacaccctcaatcccatagcacgcgctatcgggaaggaacccaaggccttcactaaggcagacatcaccaagtacatcctcgacaacgacatccacgagctcaacttccgctatacagcagctgatgggcgtctcaaggagctgaacttcgtcatccaagatgccgagtaccttgatgaagtcctctcctctggtgagcgcgtagacggctccagcctcttcccaggtctgatggaagccggctcctctgacctctatgtagtgcctaagttctcctcggccttcatggatcccttcgctgctcagcctacgatctccttcttctgcgcctatatggataagaacggccagcctctcgcggctgctcccgacgagatcctgcgccgtgctgctcaggccttccgcgaagtgacgggcggtctggagttctgcgccatgggtgagctcgagtactacgtcatcggcgatcaggaagatggctacgaagctgtcgaccagcgtggctaccatgagatgggccccttcagcaagcagatcgacttccgtacggaggctatgcgcctcatctgccaatgcggtggccagatcaagtacggccacggtgaagtagggaacttcatggctgacggtctcaactacgagcagaacgaaatcgaattcctccccgtacccgtcgaagaagcagctcagcacctgcagctcggtaagtggatcctcttcgagctcggctggagaatgggtctcaaggtaaccttcgctcctaagatcatcgtcggtaaggctggtagcggtatgcacgtccacacgaagatcgtcgacaagaacggcgtcaaccagtatgtcgaccaggctggcgaactcacggctactgctcacaaggctgtcgctggtatgatgagcctcgctgcttcgctcacggccttcggtaacacgaaccccacctcttacctgcgtctcgtacctcatcaggaggctcctacgacggtatgctggggcgaccgcaaccgctcggctctcgtgcgtgtacccctcggctggagtgcagacgtcgatatgtccagcatcatcaaccccctcgaaacgcccagcaagaagcgctacaccaataagcagacgatcgagttccgtgcctccgacggctcggctaacatctacctcctgctggctggtatctgtacggcagtacgccacggcttcgagatcgacaatgctgagcagctcgctaaggacacctatgtcgctgtgaacatccacaaggatgagttcgctggtgccgtagctcatctggatagcctgcctgcttcctgcgtcgcatcggccgaacgtctgcgccagcaccgcgctatctacgaagctcgcggtgtcttcgatcctacgacgatcgatatgctgatccgtaacctcgaggcttatcaggatgctgacctgcgtgctaaggcacaggccgatcctcagttcctcaaggagcttgtagaacgctacttctactgctaaggcgctccctccgtctaagcatcgcataaagggcagcccccgctactccatcggagtggcgggggctgctgcatttggggtgtatggggagcgagggcgctgtgcgcttagaagcgggagcgcatcgcctcagcattcttgctggcttccttgccctggaggtgagcgccgaaggtgtaggtcgcactcgccatgagcatcttgcgcatggtcatattgatgatctcgatcttattgccctcggtggttatggtcgtacggtagtcgggcgaagcgaggttcatgacgccagtgctcagacggaggtgtcccttgaggaggctatagttgaggatcaggcccgtgtagatgcgactatgtatgcgtgcgccaccagagacctcggggctcatgtagttcaggtagaagttccccgtgaaggtcttcgtgcggttgaggaagagcgtaccgttgaggctcgcactataggagagtcccttgtctgagctgagtcgtcggccgttgtagtcggcgtgggagatggtgtagctgatctgatggctgatgtagcactgcaggaaggggagtgagtggaagaagtagctattttgtagcccgacattgtactgcgtctcagcattgtcgccctgatagcgtacctcactcgtcacgggattcatcagcgctaccatcgtgatgccgtcccagtggtagttagcgaaggcctggaagttcagcgtaccgtcgagggtatagccgagggtgagagagccttgcttctcggggcgcaggtcttccttccccgagatggtagtgtattggttctcatactgaggatagggagatagctggctgaagtgcgggcggtcaaggcggatcgtcccctcgaggttcagggcatggcgctcactgggtgtgaagccgagatagatggtggggaagaaattgacgtagtcgcgcgtcttgaggtctggttgtccctgtaccttcccctcggtatgggtgtactccatacgcagcccaccacggaggttccacttcgctgagagcggctgggtgacgtcggtgtagagggcatagacgtgctcgtcgaagaggatggcatcggtgcgtgcgccgagggtcgtgtgggcaaagtattcgttgcggttgtccgtgcggctccaggtaccctttgccccgaaggcaaggatcgtcttccctaagggcagggtgaagtcgacgttcgtcaggtaggagtgtacgtgctgccccttattgctctggtaggcgaagtccgagccgggtgctggagctcctgtggcgaggtagcccgtggaggcgaagataccatctacagaggtgcgtgagcctacgtagtcggcatcccatgagatcttacgtcctggggctttggcgaaggtcttctcgaggtggaggttgagtgcagtgtaggcgccatggtccttctctgacgcagaccctggcaggcggagctggaggttctgactaccatcggggcggatggtgtagttgcgtgtctcgttcgtgcggtcgatcttcttgctgctgggtgcataggtggcggtaaagcctacggtgagctcggggctaatggtgtagtcgagaccgcctctgatattgacacctcgccccttatagtcgaaggaggaggtgctggccgaatagagctgtgtcgagggagcggtacggtaggtgtcgaagttccctacgatactcgagaggctgccgtcgaggttgagtgaggcagatacacggccctgcttgtagttgagccctgtcgagaggctggggctgatgcgccccttgtagagcgaggcattagccgagatgctcccaccgaagtagtcgttctgagccttcttcatcacgatgttcagcacaccggcattgccctccgcctcgtacttggctggtggggtggtgagtacctgtacttcggcgatgtcggactggctgtaggagcgaagcaggcccgtgagggcttcgcctgagaggcgaacgcgcttgtcgttgatgaggatgatggccttaccccgcccgatgatggagatgccgtcatcggtgacgttgagcccaggggtgcgcttgaggacgtcgagggcattctgcgccccagcgctgatctgctgggcgtcgaagacgaggcggtctgcctgacgggtgatgatggggcggcggccacgcacctcgacgccgcggagctgctgggtctcttcgctgaggagcaactcgccgaggtcaaggcctgtggcggggagggtgatggtcttgtactgaccttggtagcccagagcacggagctcgaggaggtaggtgccagcggaggccgtgagggagaaggtgccgagggagtcggtcacgacacccgtgacgagggtactgtcggggagcctacgcagtagtgcgttgcccatgtcgatggcttggcggtcacttgcgcgcaggagtctaccctggagtcgtgcgtcgcctgtgctctgagcgaaggtgcttcccgtgcccagtgcgagggcggtgaggagtagatgaaggcgtttcataagaagttctttgcgtaatggattagtattacactgcaaatatatgaactttcttttgaagtgtacaaatgtatggtacacaccttcgcatttccttctctcgggcgggaaagcactaccccccgatagcctgtcctgggctatcggggggtaggtgctatacgatggatgatggtgcgggggcggtgtgtgcgctaagacttcttattgaagatgacctcctgcaggggcagctcggtgaaggtggggaaggtcgagccaggagcgacctcggcatccgaggtgacgaagcctgcggagatggacgtcccatggacgataccgcggaaggagcggaggatcgttatcttgccgaagggcgtggtcttcgaatagtcatcgatataaatcgtgtcgccagagaagtggcaggggatgtcatacttcagggtgcccataggagagccctcatagttcaggctcagctcgacgtcctcggggctattgaagtggagggtgaagatgcccgtgctgtcgcaccattcggtgccctggaggtggtgtttgtcttcagctgtggaggctttctgggctccctggcatgagcctaataggagtgtgagggcgagcgctccgagggagagggagcggaagcaggcgtgtcgtgtcatcgtctttctgttgtgtcgttccgttgcaggtgagagatggactggggatggtactcagtagccccagcatataggggcaaaggtacacgctttccccgccttctgcaatcctcatttttaggtatttcttcctcctcatgctacgggcaaggccttcatccatcacagcggtttttcttattcagtagcgggaaaaagtagtagtcccgtgaggaagtatgtagcttcccatagtggtatttctctatccacgtacgtagtcttatcggccaggtatctaaatccaaatgtccacgtacgtagtccttagatctacgtacgtagatcgaatgaatcctccgcagatctgtaggttttcctcgtatgcgtaggcgttcataccattattacttccagctttttcctccgcagaaatgcacctgcatgctattgctatgcggcacgtatcggacggtactgtataattgtccttttgtagatagaggcttagcgatttgctcccaaagtgggggcttcaagtggcggaggtggggtgtgcgagtagctgcagggagcgggcttcgaggagctctgcgcagggcgtttaagtgataggagacgaggagcttacgttcgtcaaaatatttatttagtcggctccttggaggggcggagtatttgccgttactttgtcgtggagtcctgctcgaagctctctttttgcagtcctcacctcgcccagctcctcccttgtatatatgtatgctggtcgggtagggggcgggaagaagcggagcgctccggcctacatttattcattttattcataccacacgacgatgaaaacacctatcatctcttcgtctgccgctgtccagtccagcgtgccttccctcatcttccgcgcctatacggtcaaggagcttgcctgtctttacttcccacagaagacagctacaggagcctcccgctccctgcgtgcactcattcgccacgaccccgagctgctctcccagctacgtgcccaaggctatcgcccgcgggtgcactacctaccgccctctgccgtgcaggtactactcgagcatttaggcactccagaggagttctacgagatccttcgcaaggcttagcggacgcttattccatgggggcggtacgggccaaacgaaatatttgactatctttgcaccacaattaagaggacgtgtgcgccgttatagtcatgccgtagggcataagagtccgcacccctccaatggattggttgggtagctcagctggatagagcaatagccttctaagctatcggtcctgggttcgaatcccagcccaatcacacaagctccccccactcaatatcccttacatcacgaagatactctttgatggggttggcttttggctcttcgccatcgtctctgtagccacctccggctgccatttatagtcagatatattatcccttgggtggctgatccctcccaagcacttcgggtcgtcaggggcgtctgtagggcgcactctcatcgctatcgtggcctactacccaaagtccttgtgtcgatcagctccctatgacatccgtcctgaaggagcccccgtccccgggggatagtacgtattcataatcaatatgcaacgatacaatatcaccgagctatccagcaagacgctggaggagctccaggagatcgcccgagaaataggcttctctcccgatgccttccccgagaagcgcgaactgatctacgagatcctggaccagcaagctgtcaccgtcgctgagacgacgagtgtcaagcgcaagcctggtcgccctcgcaagacctcttccaccgaagagtctacccatgaaacgcccaagtccacccccgctacctcttctgctcccgctgatgacgcccccgcagcctcggaggacgctcccgaagtagagcagccaaagcgtaagcgtggtcgcccctctaaggctgaagcgctggcacgtgagcaagccctctctgccgtagctaaggcctccgaagagcatgctaaggatcccgaagcgatcgctgtcgaggagccagcagctcccgcccccaagcccatccgtggcgcccgcacgtcggcctccgctgcgaagcctgctcagagccctgctgtcgcagtagagcctcgtgtcgctgaagctgcccccgcagccgcagccgctaaggaaggcgaagctcccgcagcagcacctgcgcagagccccgcacgcatggtcttccggcacaaggatagtaagtccgtccttgacgagatcctgcctaccctcaatacacctcagccccagcccaaggtacgtcagcagcagccccaggctcctgctcagcccccagtacatcaggtacaggcacagcagcctgccgagcctaaggctcagcccgctgtgaaggctgtcgctcgcccccagcaggagttcgacttctcgggtatcctcgagtgctccggcgtactggagatcctgcccgacggctatggcttcctccgctctgcggactacaactacctcccttcgcctgatgatatctacctctcggcaaaccagatcaagcagtggagcttgcgccctggcgacctcgtcgagggcttcatccgtcctccacaggatggcgataagtacttccccttcgatacgatcacgcgtgtcaatgggcgtaccccctcggagatgcgcgaccgcgtacccttcgatcacctcacgccgatcttccccgatgagaagttccgcctcgagtctaccaataaccctgctgtacaggacaagatcgcgatgcgtatcgtcgacctcttcgctcctatcggtaaggggcagcgtggtctcatcgtcgcacagcccaagacgggtaagaccgtcctgctgaagaatatcgctaacgctatcgcagccaaccaccccgaggtctatatgatcatcctcctcatcgacgagcgtcctgaggaagtcaccgacatggcgaccagcgtcaatgccgaggtcatcgcttcgaccttcgacgagcctgctgaccgccacgtcaagatcgccgagatcgtgctcaacaaggctaagcgtatggtcgagagcggtcaggatgtcgtcatcctcctcgactccatcacgcgtctggcacgtgcctacaatacagtacagcctgcctcgggtaaggtcctctccggtggtgtcgatgccaacgccctgcagaagcccaagcgcttcttcggtgctgcgcgtaacatccgcggtggcggtagcctgacgatcctcgctacggccctgcaggagacgggctcgaagatggatgatgtgatcttcgaagagttcaagggcacgggtaacatggagctccagctcgaccgtcgtctggcgaataagcgtatctatcctgccgtcgatctggtggccagcagcacgcgtcgcgatgacctcctgcaggatcagacgacccagagccgtatgtggtctgtgcgtaaggtcctctctgagatgaaccccatcgaagcgatggagaacgtcaagaacctcatgctccgcaccaaggataatgaggagttcttcgccgaagtgaatagctaagagaggcggtagtggcttagtccaatagttctcttatctttgtagagcaaacacaattactactaacacaaaatatcctatcgcacaatgagcaagatcggtattttctacggctcttctacgggctctacttccgaagtagcacagcgtctggctaaggccctcggcgcagaagctaatgtctatgatgtcgctggcgcagacgctgctgatgcagctgccttcgatgtcctcctcctcggttcctctacgtggggtatcggtgaccttcaggacgactgggaagacttcctccccaagctcgctgagcagaacctcgctggcaagaaggtagctctcttcggctgcggtgacgctgatagctatcccgatagcttctgcgaagctctggctaagatccacgaaggcctcgctggtacgggctgctccttcatcggtgcttacgagcccgaaggctacagctacgatgctactgaaacggaacaggatggcaagctcatcggtctctgcatcgacgaagctaaccagtctgacctcaccgacgaacgtatcgaaaagtgggtcgctctgctgcagtcgcagttctaagagcgagcgcttagcacgaccaatatcagttgcccttcggctgtctcccacacgggggtacggccgaagggcaactttttgtatctttagggtatagttagttagctcgctattcatcactatcatcatcaaatacactatgaagcaaacgacactcctcgcagcctttgccctggctgtcacagcctgggctactccgtctgctgaggcttgctccgacctgatcgtgggcaagaaggcgtcggtcgacggctccgtcatgatcagctactcggccgactcgcacaccctctacggcgacctcgtacattatccagctaaggcttggggcaagggcctcatgctccagatccacgagtgggatacgggcaagccccttggctatatccctcaggctgctgtcacctacaatgtcgtggggaacatgaacgagcatcaggtagccatcaccgagagtacttggggtggccgcaaggaactccgcgatccctcgggcgtcatggactatggtagcctcatctacgtagcactgcagcgctcccgctcagctcgcgaagcgatccgcgtcatgaccgacctcgtccgcgaccacggctactacagctcgggtgagtccttcaccatcgctgacaagaacgaagtctggatcatggagcttatcggtaagggccccaagaagaagggcgctacgtgggtagctatccgcatccccgatgacgctatcgcagcgcacgccaaccaggcacgtatccacaagatccccttcggtgacaaggagaactgtatgtacgagaaggatgtagtcaacgtagctcgtgagaacggatggttcaagggtaaggataaggacttcgacttccagaaggcttacaacccctatgacttcagcggcctgcgtgcttgcgaagcccgtgtatggagcttcttccgcaccttcgacaagagcatggacaagtacaagaagcacattatgggtgatgtttccgaagagcccatgcctctctacatcatccccgaccgcaaggtgagcctcgctgacgtccgcgaagggatgcgtaaccactacgaaggtaccgagctctcgatgacgaatgaccctggggctggtgcctacaaggtcccctaccgctggcgtcctatgaccttcaagagcgaaggccgtgagtacttcaacgagcgtgctatcgctacgcagcagacgggcttcgtgctcatcgctcagatgcgtagctggctgcccgatgctgtcggtggtatcctgtggttcggtgtggacgatgccaatacggctgtcctcacgcctatgtatgcctccatcactgagatccccgaatgctatcgccgtggcaacgggagcatgacggagttcagctggacgtcggccttctggatccacaactgggtagctaacatggcgtacaaccgctatgagcctatgatccgcgacattcgccccgtgcagaaggagctggaagatagctacgtcgacctggtgaagaacaccgacgctaaggctctcgagctgctgaagagcagccccgcacaggccaccgcttacctcacggaggtctgtggcaaggtagccaacgagacgaccgctcgctggaagaagctcggtgaatacctcctcgtcaagtacatggacggtaacgtcaagaaggagaaggacggcaagttcgaagagaacggctacggccagatcgtctcgcccaacttccccggctacagccaggagtactacgaccaggtcgctaagagcggagaggccaagcacctcgaggtccccaagaaggataagtaatcgtacttcctcccaatagtagcttcgcccccgtgctctcgtagcgcgggggcgaagtcgtataaggggatcgggggcgcttgctaaggcgcatatcctccagcgtgtaggcggggcagaatttccgtatatgcacaaatatatttctgtatatgcgaaaaaatatttccgcatatacgaaaataaatcgccgtatatacgcaagtttatcggcgcatatacggctgctcggcgccttgctttcgcccgctgtatggggtggggagtgcgaggcgaaggtgcactaccacttggataaaaacgatcgtccacggactgtcacccaccgagggtggggcagtccgtggacgatttgtcttgtggaggcggggtgcgcctgcggctacttcagcgtgccgagctcacggccgaccttgatgaaggcagcgatggccttgtcgaggtgatggcgttcgtgtgcggcggagagctgtacgcggatacgtgcctggcccttggggacgacggggtagtagaagcccgtgacgtagatcccttcttcgaggaggcgtgcagcgtattcctgcgagagcttagcatcgtagagcatcacggcacagatagctgactgggtgggcttgatgtcgaagccggcagcgagcatcttgtcgcggaagtactcgacgttctccatcagcttggtgtgcagggcatcgctttcttcgagcatcttgaagacttcgaggccagcgccgacgactgcgggagggatggagttactgaagaggtaggggcgtgagcgctgacgaagcatgtcgatgacttccttggggcccgtggtgaagccgccgatagcaccaccgaaggccttaccgagcgtaccggtgtgcaggtcgatacggccgtagcagttgaactgctcggcgacaccgcgacccgtgggaccgacgacaccagccgagtggcattcgtcgaccatgacgagcgcatcgtacttgtccgcgaggtcgcagatcttatccatcggagcgacgttgccgtccatggagaagacgccgtcggtgacgatgatgcggaagcgagcggactgggcttcttggagtacgcgctccaggtcttccatgttcgcattttcgtagcggtagcgctgggccttacagaggcgtacgccgtcgatgatagaggcgtggttcagcgcatcgctgatgatagcgtcttcagggccgaagaggggctcgaagaccccgccattagcgtcgaagcaggcggcgtagaggatggtgtcttcggtgtggaagtagcgggcgatggcctgctcgagctgcttgtggatgtcctgcgtaccgcagatgaagcggacggagctcatcccgaagccgtggctgtccatggcggccttagcggctgctaccagacgaggatggtcggagagaccgaggtagttattggcgcagaagttgatgacctcctgccccgtgctgatcttgatgtcggcagtctgaggggtcgtgatgatacgctcccgcttgtagaggccggcttcgtcgatggattgaagttcctcagcgaggtacttcttcatgttcttaaacatagtccttgtttcttcgtgtatagcttgctaagtagtgtgctttgcttgctggtgtgccgtgtgggcgagcgaaggctctatcccttgcggcggatggtctcgatcatatcgcgcgtcatggcgggcaggtcgtactggggcttccagtcccactcgcttcgagcgcagctatcgtcaagggagttaggccaagagtcggcgataccctgacggagttcgtcgagctcgtaggtcatctcgaaggtagggatcacctcacggatagaggcagcgataccctcggggtcgaagctcatcgaggtgatgttgaaggaattgcggtgaatgagtcgtgcggggtcagcttccataagttcgacgcaggcgcgtagggcatcgggcatatacatcatatccatataggtgcctgggcgcagggggcatgcgaagcgaccttcgcgtacagcggcatagtagatgtctacagcatagtcagtagtaccaccacccggaggtgcaacattagagataaggccagggaagcgtacggagcgtgtgtcgacaccgaagcgcttctgatagtaatcactgaggagctcgccagagaccttcgtcaccccgtacatagtcttggggcgctggatggtgtcctgtggcgtcatgtcgcgaggtgtctcgggaccgaaggagccgatagagctgggggtgaagaccgcacagccattctcgcgtgctacctcgaggacgttgaagagaccgccgaggccgatctgccatgccagctgcggcttggcttcggcgacagcactcagcagtgctgccagattgaagatcgtgtcgatcttgtagcgacgtacgacttcggtgatctgctggggattggtaatgtctaccacttcacaaggacctgtctcgaggagttcgcccttgggaggagctgcagggatgtaccctgccacgactacgggatagagtcggcggagcgtcatagcgagctcggtcccgatctggcctgtagagccgatgataaggatgtttttcatacctctttgtgatacgtattttcttgcgagatgctcgctagcagggtacttcatggtgacgctgcaggtgcgaggcggacctaataaatgcgtacaaatgccctttactatgcgccaaatgtagttaatctcgttggaaaaatcagtatttcatagtgcgtgcccttataaggctctgattattcgcttggtagggtgcctatggagatgtgtaggagacgctatacctttgtctacgctaacgaaagaactttaagaagatgactcattgtgtgatgcacacgctcccttcggggcttaggatcatcgcttcggtagagcccgaggcggcagtcagctacgtgggccttggggtgcgcgtaggggctcgtgacgaaggcctgcgctggcatgggctggcgcatagcatcgagcacatgctcttcaagggtacgcgcctacgctcctcgagccagatcatcgagcgtatggagtccgtgggggctgagctgaatgcctatacgacgaaggaggagacgatgctctacgccatcgccccctcacgctatgcacggcgctcgctgcacatgatcctcgacatcgctgcccatagcacgttccccgagcgggagtgggcgaaggagcaggaggtcatcctcgatgagatccattcgtatgaagatagcccctcggagctgatcttcgatgagtttgaggatcaggtcttccgcccgcaccgccttgggcatgctatcctcggtacagaggcttcggtggggcgcatcacagtggaggcgcagcgccgcttccatcgcacgtactaccgccctgagcgtatggtgctctttgcccgtggtgtgctcgatatggacgacttgatagccgcagcggagcgggccttcccaggtgaaggtcagcctctcatctcaagcagcgcacttcccgagccactccccgtacctatatataataaggaggcgcgtcgcgtggtgcgtcgtcgggatacggcgcagagccacgtgctgctggggcgtgccgcttattcgctctatgacccgcggcgtctggcgcttagtcttctcgcgagtatcctcggcgggagcgggatgaatgcccgactgaatatgcagctgcgagagcagcgtgggctggtctatcatgtcgagtgcaactacacgccctacaccgatacggggctcttctccgtctacttcggctcgtcgcatcgtgctgaagcggaggctatcgagctggtctatgccgagctggcacgcttggtggctgagcctttgacgcagcgagccctggagcaggctctacgtcagacacgtggtcagatgatcgtcgcctcggagcaaagggagcagcacttcctctcgatgggtaagagcttcctgcatacgggcacgttcgagtcggacgaagtgcttcaggagcgcctctccgccctcacgcctgaattactgcacgaggtcgctacggagctcttcgaccgctctatgttccacgaacttatctatcgctaacgcaggcgaaggcatccccttatcgcgagtattcttcttattcagcgaagggaaaagcatcgttctcgtgaagaaaaaagcacctttacatagtgcttttcctctgtctacgtacgtagtcttaaagacctggtacgtcaatcccaatatccacgtacgtagatattagagccacgtacgtagcttaaacttatctgccactcgtccacaacttttatccctacgcggagcaacaacctaaatataggccagtccgccgacctatataggttcataccgctccgctatcggggggcgagtatgctgtgatagtcgtttggtgaatcgcccccattgagctggcttaggcttgcttatattggggaatcattttatctttgcttcatcaaagaaacgggcggatcgttggccaacgaatacgctacaaaagaatatgacgaatcgaatgtacaatagaggttggtggcgcactcaggatagtaatatcgtgagttaggcatctatgtccctattgtaaattcatcatcagcatataatagaggcttgtcgtgactcacggcaagcctctttgtcgtgagtacggatccgcagaaatgacgtcacctgccttaggcctctacttagctccaactcttcattcaaaatcccaacttttatgacacccttccaagtagatcccaacggcttttatggcgacttcggtggcgcctttgttccctccatcctcgagcccatcatcaaggagctgcaagatacgtacctacagatcatcgagagcaaggacttccaagaggagttccacacgctgctgcgtgactatgtaggtcgccccagccccctctatcacgcgcgccgactcagcgagaagtatggtgcgaagatctacctcaagcgcgaggacctcaatcacacgggggcgcacaagatcaataatgccctcgggcagatcctgctggcaaagaagatgggtaagcaccgcatcatcgccgagacgggtgcaggccagcatggtgtagccactgccaccgcctgtgcgctcatgggtatggagtgctatatctatatgggcgcacttgatgtcgagcgtcagcatgtcaatgtcgagcgcatgaagatgctcggtgctaccgtcgtcccagcgaagagtggtaatcagacgctcaaggacgctgtgaatgaggcgctcatggcatggtgcgagcgtcccgaagataccttctacctcatcgggtcggcagtaggtccacatccttatcccgatatggtagcacgtctgcagagcgtcatcagcaaggagatcaaggcacagcttcaggagaaggaaggacgcgactaccccgactacctcttagcttgtatcggtggcgggtctaacgccgcaggtacgatgtaccactatctcgatgatccacgcgtgcgtatcgtcttaggcgaagggggcggtcatggtatggatagcggggagacagccgccacgatcaatatcggtaccgagggtgtcctgcacggaagccgtaccctcgtcatccagactcccgagggcgaagtgaaagagccttactccatctcggctgggctcgattatcctggcatcggcccgctgatctctcagatcgctgtacaagagcgtgctgaggtgctgtcgatcaatgacgacgaggcactgcgtgctgccttcgagctgacgcgcttggaggggattatcccagcgctggagagtagccacgccttaggtctcctgcctcatgtcaagttccagccagaggacgtcgtcgtgctgactgtgagtggacgcggtgacaaggatatctctacctatctggctcacaaagcagagatcttaggggaataaaggcgcgataagcagagtacgacgaggcccctgtctccagagagctggatgcaggggcctcgtcgccgtgctacggcataggcgcgtgtgtagagggcttttcgtacatttgtactctaaaagaaatcatcaagtaagatagtagctatcccctaagcggaacaaatatgaatatatcctacgatctactacgctcctacgtggagacggatctgacccccgatgaagtcgctgctgccctgacctctatcggtcttgaggtaggcggtgtagaagaagtcgaatcaatccccggtgggctcaagggccttgtcatcggtcacgtgctgacctgcgatgtgcatgagaactccgatcacctccacgtcacgacagtagatgtaggtgccgaggcacccctgcagatcgtctgtggtgcgcccaatgtagccgctggtaaggcggtcgtcgtcgctaccatcggtaccgtcctcacctcgggtgacgaatccttcaccatcaagaagagcaagatccgtggcgtcgagagcttcggtatgctctgtagtgaggtcgagatcggcgtcgggcacgacaatagcggtatcatcctcctcgatgccgctacgacgaagcctgggacgcctgctgctgagcacttcggtgtcagctccgactacgtccttgaggtcgatatcacgccgaaccgtgtcgatgctacttcacactatggtgttgcccgcgatctcgctgcttatctcacgcagcaggggaaggccacgaaggctaagctccccgaggtgctccccgcacctgccgctgggacggcttgccccgtgcctgtcacggtcgctgtcgatgagaccctttgcccccgcttcgagggtcttgtgatccgtggactcaaggtcaccgagagccccgactggctgcgtcgccagcttgagacgctgggtctgcgccccatcaacgtagtcgtcgacgtgacgaactacgtcctgcacgaattcggtcagcccctccacgcctatgacttggcgaagacgggtggcgccctctcggtgcagctggcacgagaggagaagatggtcctcctcgacaagagcgaaggccagctcactgagcgtgacctcgtcatcgcttcggctacgggtgagcccctctgcgtcgctggcgtcatgggaggtctggactcgggtacgacggagacgacgacggatatcttcctcgagtcagcgaacttcaacgctacctccgtgcgcaagaccgcacgccgtctggctgtgaatacggactcctccttccgcttcgagcgtggactggaccccaaccgcacgacctgggcgctgatgcgtgctgcttcgctcatcctcgagctttgccccggtagctatatcgatggtggccgcttcgaccactatcccgtgcctgctcagccctacgaagtgacactgcgccccagccatatggatgcactcatcggtaagttcatcccccgcgacgaggctgtacgtatcctcgagagcctcgagatcgagatcgtctcccgtgaggaagacgcttggcagctgcgtgtaccccgctatcgtgtcgacgtgactcgtgaggccgacgtcatcgaggaggtcatgcgcatctacggatacaacaatattgagctcagtggctacgtccacgctaacctcagccccaagggagcgagcgaccgctcttacagccgtcgcatcctcctctcggagcagctgacgggcgcgggcttcaatgagcttctcaataactccctctcctccgaagcctactacgaagggcttacctcctgccccgctgataagctcgtgcagctggtcaaccccctcagtggcgagctgaacgtgatgcgccagacgctcctcttcggggggctctccgctatcagccgtaatctccgccgtcagcagaagagcttctactactatgagtgggggaattgctacgctgctgctcccgaagtcgagcgctctaccgccacgacgctggcaggctaccgtgagacgcagaccctcggcctgtgggttgctggtgcacgcatccagagcagctgggcacatgctgacgagcctgcttcgccctttgagctgaaggcccatgtcctgcacatcctcgagcgtctgggcatcagtgagcgtagcctgcgtgctgagtttgtcgagtgcgacctcttcacgggtcgtggctacagctatgcgacctatgacggcaagcctgtcgtgctgatgggtcaggtcaagtccgccctcttggctaagtgggatatcgatatccccgtctactacgccgagatcaactgggacaacctcaatcgcctcgctgagcgtgtgaagatcgagatcgctgacctgcctaagttccccgtcgtacgccgcgacctctcgctcctcctcgacgagaagattacctttgcagagctggctgagaccgctcgccgtgcagagaagaagctcctgcgtgatgtgaccctcttcgacgtgtacgaggggaagaacctccccgcagggaagaagagctatgccctctccttctacctgcaggatacggagcgcacgatgagcgataagcagatcgatgccatcatggcgaagatccgcaagagcctcgaggatacctatggagctaccctccgctaaccacctaagacgaatcaactatcactaaagaatatttatgggaagagcatttgaatatcgtaaagctcgtaagatgaagcgctggggcaacatggcccgcgtcttcacgaagctcggtaaggaaatcaccattgcggtcaaggctgggggccccgagcccgagaccaacccacgtctgcgcgtcctgatgcagacggccaagaaggagaacatgcctaaggagaacgtggagcgcgccatcaagaaggccagctcgaaggacttctccgactataaggagatgaactacgagggctatggccccttcggtatcgctatcttcgttgagactgctaccgacaacaccactcgtacggtggccaacgtccgcagctacttcaataagttcggcggtagcctcggtacctcgggctcgctggagttcctcttcgatcacaagtgtatcttccacatcgtgaagaaggaaggtatggacctcgaagagctggagctggagctgatcgactacggtgtagatgagctggaggaagacgaaaacgaaatcatcctctacggcccattctctgctaatgcccagatccagtcgtacctcgaagaagctggctacgagattacctctgctgagttcgtccgcctgcctaacgacacgaagcctgtgacgcctgagcagcgtgagaccctcgctaagctcatcgacaagctcgaggaagatgaggacgtgcagaacgtcttcaccaatatgcaggaggaggaagaagaggaagcctaatcccttcgacccactgctccccacctcggggaagccccacgataaagcgatccgctacggatgcaccctcactcggtgctccgtagcggatcgctttttattcggagggaagtcgttgctactatccccgcaaagtggtgggtattagtgtatttctggtagcgcctatgtggagcaaatgagtggtggggaagggactatcgcaatccgtggcaatgtcgtatctttgtctaatatagtggttagccgatcatttgcccgcccaaaggcgttattagagcaagtggtcaccctgcgagagtgggggagactgacctattacacgaacccgtacatgacgatcaagatgaaaagttacttagggtacatcgcggcgctctgcctcctcacgccattcagtggggtagcacagcgctccaatgtgcgtgccgctgatcgcctactacagagcgataaacccaactacacggagatccgccgcctcatcaagctcgccgaagagcatgaggagaccaagggtgatgcctatacctactatgtcaagggccttgtagagcataccctctataagaccgagttccgcaaggtcacgaccccagggagtgtgggtgatacggcgaagatgtttcgccatgtcgtcgatgaactcgtcggctggcgtcgtgcagactctatcgagcgtcagcccgatccctcgacgggacgtatcgtgctgaagtatcagaagaagatccaggactatgtgcgtgaggatgccccgaagatgtatgaggcggggctcttctggctcgaccgcaagaagtatgctgagtctacggctgccttctctgcggctcttgaggcgcagcgcctacttctgcccgtagggcgcaaggagctccccaccgatacgacggtcgctaacctcgcttactatgcgctggtgtctgcctacactggggagctttaccctgaggtgatccgcctcggtgagctctatcgtgacgtagctgccaataagaatgaggtctatcagttccttgctaaggcccacatggctatgcaggatacggtcggtgcgatgcccttccttgaggaaggtatccgactttaccccgagacgaccttctactttggctcgatgatctcgatctatcaggcccaaggccgctacaaggaagctgtcgccctcattgacaaggcgctgaaggtgacccccgacaaccccaatctcttggtgcttcgcggtaatgtctacttccttgcccaggagtgggatcgtgctgtcgaggtctatcgtcaggtccttcgccagaaccccgacaactacgatgcgctcttcaacctcggccaggtctactacaaccaagctgtctctatcctggccaatccgctgagctcacgtctcgaggagaagaaggccaaggaatacttccgccaatcccttccccagctcgaggctgcctacaagatcgctcccgatcaggtgcgtgacctcctcggcaatgtctactaccgcttggggctggagcagaagtatgctgagctctacacggacaaatcttcaagcaaatgaacccaactatagcctcctccgtgcgtgaggccctcctcaatcgcttcctccgctacgtacagatcgatacggagagcgatcccaatagcacgacttacccctcgacagagaagcagtttgacctgctccgtcttctgcgtgacgagctgatagccctcggtgtaccctccgtacgcctcgaagagaagggctatgtgatggcgcagatcccagctactccaggctatgaggatcgtcctgcgctggggctcatctcgcatgtcgatacgagccctgacttcacgggccgtggtgtccgtccgcagatcatcgagtactatgatggtacgcctatccccctcggtgatgatgccatgctcacggtacaggagttccccgagctactggagttccttgagcatacgctcatcacgactgatgggacgacactcctcggagcggatgacaaggcgggtgtcgccgagatcatggagacggtacgctacatcctcgagcatcccgagctaccccacgggcgtatctgcatcggcttcacccctgacgaagagatcggcaagggcgtggactacttcgatgtagaggccttcggtgcggactttgccttcaccgtcgacggcagccgtgagggcgagctggagtatgagaacttcaacgctgcctccgctcgcgtcgtcgctacggggcgtagcatccacccaggctcggctaaggggaagatgatcaatgctatcgaggtgatctacctcctgcatgcttcactccctcactatgcacgccctgagttcaccgagggttatgagggcttctaccacctgatgcacttcaccggtggggtagagcatgccgaagccgagtacatcatccgcgatcatgatcgtgcgctcttcgaggagaagaaggcgctgatggagcgtgtcgcaggcgagatcaatgccgcttacaagcgtgaggtcatcaaggtcgagatccgcgactcctactataatatgtacgaacaggtggcaccccacgaggagtatatcgagcgcgctaaggcagctatgctccgtgctggagtcacgccccgcatctcgcccatccgtggcgggacggatggcgcccgcctctcttatatgggactgccttgtcccaacctcttcacgggtggagcgaacttccatgggaagtatgagtatgcttcgcttgacacgatgtgccgctcggtagagacgcttgtctacctcctcactgagactgcggagtaagtaatgatacagaagaaaaggatcgccgtcctcggctctacgggctctatcgggacgcaggccctggaggtcgtccgtagtcatcgtgaagccttcgaggtgacggtgctggtggcacgccgatcgacagagctcttgatagctcaggccttggagttcagtcccgctgtggtcgtgatctccgacgaagcctattatcccgaggtccgacaagccctatcgcatacctctatcgaggttatggcagggagtgaagctatcgcggaggtggtcgtccgacctgatgtagatatcgtcctcacggcgatggtcggcttctctggcttagtacccacacttgcagctatcacagcagggaagactatcgccctatcaaataaggagacgctcgtcgtagcaggcgagctcatcatatcgctcgctacgcgtcatggagcgcgtatcctgcctgtcgactctgagcactcggctatctatcagtgcctcgtcggggaggaaggcaatccgctggagcgcatcctgcttacggcatcgggaggtcccttccgtagctataagcgagtagaggagcttgaggccgtgacggtcgaggctgctctgcgtcaccccaactggagtatgggggctaaggtcaccattgactccgcctcgctgatgaataaggggctggagatgatcgaggcccgatggctctttgatacgcctgccgaatcgatcgaggtacttgtgcatccgcagagcatcatccactcgatggtggagttcgccgatggctcgatcaaggcacagctgggtcagcccgatatgcgcctgcccattagctatgcgctcggccttacggagcgtgtgagcaatgactatccccgcctcaacttcctcgagcacacctttacctttgagcgcccaaatatggagctcttccccaacctcgcgctggcctatcgagcgctggagcttggtggtaccgctccatgtgtgctcaatgccgccaatgagatcgctgtcgaagccttcctcgctggcaagctgggcttccgtgctatgagcgcgctcatcgcccaggccctggaggcgcaccgccccgagcggagctacgacctccagctgctctcagagctcgatgtcgcagtgcgtgctgagtctcgtgagcgcctcaatcatatcagataatagtaatccaatggatatagcaattcgtgtacttcaactcctcctctcgctctccatcctcgtcttcatccacgagctggggcactactcgatggcccgtttcttcggagcgcgtgtagagaagttctatctcttctttaacccctggttctctatcttcaagtggaagagtaagcgtagcggtacggtctacggccttggctggctccctctcggtggctactgccagatcgctggtatgatcgatgagtcgctggataccgaggcgatggccagtgcgcctaagcccgatgagttccgcagcaagaagcctttcgctcgcctgatgatcatggccggtggggtgatcttcaatgtcatcctcgccttcatcatatatactggtatcaccctcacttgggggacgaaggtccttcatagcgatcaggtctctgcggggatgaacttctccacgcccgctgaggaggttggctttgtcgacggggatgtgatcctcagcgtcgacggcaagcagtctcccaatgtgcttgactcacgcttcatgtcgtcgctcatcaatgctcacgaagtcgtggtgcgtcgtggcggtgccgtggagacgatccgcctgcccgaggatatgatgcagcgcctcctccgtgctgaagagggctttggctctctgcgtatgcccttcgtcgtagatgcagtctccgaaggtagccgtgcgcaggggcatctggtctctggagaccgtgtcgtagcagtcgactccgtcacctgcaccgatgtcacggaggtcatcacggctctggacaagaagaagggtaaggacgtcgtgcttaccgtcgagcgctcgggtacggctctgcagaccatgctccccgtagacacggcagggcatatcggtgtcgtcctcaagggcatcgaagagctctatcctatcgagcacgtccagtacaatgtcttcacggctatccctgcaggtatcgaccgcgcaggtcagacgatctcgggctatgttcgtgggctgaaatatatgttcaccaaggagggcgctaagcagatgggcggcctcggtacgatgggtaagctcttccccacgaccttcgactggcagagcttctggtctatcacggccttcctctctatcatccttgcggtgatgaatatcctgcctatccccgcacttgatggggggcacatcctcttcatcatcatcgagatgatccgtcgcaagcctcttagcgataaggcgatgaccacgatccagactattggtctcgtgctactcgtcctgctgatggtctatgcgaacggcaatgatatctaccgagccttcttcggcaagtaagtagagcgtatgggggacttccgcgtccatatcttaggctgtggctcagctctgccgacgatgcagcactaccctacggctcaggtcgtggagcttcgtgataagctcttcgtcgtggactgtggggagggtgcgcagcgtcagctacgccgtcagcgcctggacttcgggcgtatcgtcggcgtcttcatctcccatctgcatggcgaccattgctacgggctctacgggctcctctctacgatggggatgctcggccgtcgcagggcactccccgtatatggtcctcgagggatcgataagttcttagcccccttcatcgaggagagtcgctcctatctgggttacgacatcgaggtgcatgtagtggatgaccgcacgagtagtgtttgctatgaggatcggtcggtgacggtgacgacgctcccgctggagcaccgcacgccctgcacgggctacctcttccgcgagaaggtcacggagcgccatattgatcgcgcttcgtgtgatttctacggcgttcctcgttcttattatacagcgctacgtgagggagcggacttcaccaccgaggaggggaaggtcatcccctgtgagcgactgacgcgtcagggtaagactccacggagctatgcctactgctcggatacggcttacctgccctcgctggtgccactccttcgggatgtgagcctcctttatcacgaggcgacgttcctcagcgaccgcttggcgcgagctaaggagacggcgcatagtacggctgagcaggctgcgcgtatagcacaggctgcgggtgtcgagcgccttgtcatcggccactattcggcccgctatatagatatccagcctctcttagaggaggctcaggccgtcttccccgagaccgtagcagcggacgaagggatgatcctcgaactttgatatacatctctcccagccccattgcttctgggagctccaattaatacaaattatatgactacgaagaagacgatcaagcgactcatcctctctctggggtgtgcttctcttgctctaagcccgcttgcaagccaggtcctggaggtgcgtcctgatcggactatcctgactcagctgcagcaggactttgtgagccgcaattatgtaggcttccggcacgacctgcctcgcctgcgtgctttaccattacttaccgagcaccagccctatcgtgaggcggtagctcgtctgatgaccgaggagacgtctcccgacgctgtcctcacacgcttcctcaaggagcatccaggctcccttgatcgtccctcagcagagctcttgctcactctggtgtatgtcgatcaggggctcctccctcttgcccgtacgcagctcgagcaggtcaagcgctcggcactctctcctcgtgaggctgctcagtacgacttagctctcgcctacacgatcctggccgaccagagaagtgcagctgacctggatgaagctcagcgcctcctcctctctgcgagtgaagactcctctatcatcggggagcaggctctcatctacctcggctctgtggcttgggcacgtggggatattcaggaggctcgtgcgatcttctcgcgcaatgattactccagcgacctcgctcccgaggctgcctatcagcttgctctgctctcctttgctacggaggatgctaagacggctcagcgtcgtgcgagtgacctccagcgtcgctatcccgagatggcttcgcgtgcttccttccagtcggtcatcgggcagtcctactatgctgatggcaattatgatcaggctatccgcactctccagcccctacaggagctcgaggactataagcccacggcagaggagagctatgccctcggtacttcactctatgctaagggacgctacgaagaagcgcttcgtccgctgagtactgcctctgagagcagctctgctatcggtgcacaggggctcttcctccttggtaatgcccgcctcaagcttcagcgcacgagcgaagctgctctggcgttcagccgtgcaggccagcaccctggggctaccgagcgagtacgcgagtacgcgctgtacaatgggatcctcctgcaggacgagacgcagcgctcgaacttcggtcagaccgttcgcatggctgagaccttcgtcaccgagttccccaactccagctaccgccctcagatcctccagctcatgaagagtatcttcctgacgaataaggactacgctgagtcgctcgctacgctggatcgtctgcaggtcaagagtgctgagctgagcgaagccaagcagtacgtcctgcttcgcctcggtgaaggtgctttggcttctcgtgactatgcccgtgctaatgattacctgaatcgcgccgtcacactcggcacgaagaacgagtacacggctcaggcacatctcctcgctgcttcgagtgctctggagcgtggcgagtatgctgctgctgagtctgctgcatcgaagagtatcgctacgggtgcagctcctgcgctggcacattatatccagggctacgctcgctacaatcagaagcagtacgcctcggcttaccgctccttcgaagccttcacgcagtcaagctctggcgatgatgctctgcgtcgtgccgatgccctctcccgcatgggcgactgccagctcatccagaagaagagcgcagaggctctggctctctaccgtcgtgccgacgaaggtatgcccacagggaatgacgaagctctctatcgtatcgctacgatctacggccgctgggggcagtatcagaagcagatcgagacgctcgaccgcatcatcaagacgcaccccgagtccacgcacctgcctgaggtcctctatgacaagggtcgtgcgctggtgctgagcaaggcgcgtcccgaagaggcgaccgctgtcttcaaccagctcgtcaaggactatcccgatacccagtatgcgcgcctcggtgctatggagcgtgctatgctggcctacaataacgggcgtaccgaggaggctatcaaggcctacaaggacctcatcgcccgctaccctgagagtgaagaagctcgctccgcactctctgacctcaagaatatctacgtcagtctggaccgcgtcgatgagtacacggcctatgcctctaccctcggcaagcagctgacaccctcagagagcgagaaggcgcacctgcagtacctctctcttgagagccgctacaagaaggataagaatgcttctatcgcagacctcgagtccttcgtccgctcctatcccgccagccgtgaggccggtcgtgctgagctcctcctggctggtcactacgcccagcagggccgcagcgacgaagccgaggcgctctacaagaagctctctgctcccgcacgctccctcgacctgcgtatccccgccctcgaagctctgacgaagatctataacgatggtggtaagaagcgtgaggctctcgatgcttggtccagcctctacgctatcgaagggctggaagctccccagcatctgcgctatgggcttgctctctctcgtgcagcctacgaagcgaaggactacaagcgctcgatctctacgaccgagagcctcctgaagcgtagcgacctccccgcagctactcaggctgagctcctcctcatccagggtaagagcgaagaagctatgggtgctaccggcaaggctatgaagacctatgagcccctgctcaagaactttgataccgcctatggtgctgaaggctatatccgccactccacgcttctcttccgcgctggcaaggtgaaggagacgaagaagcagctcgatgccttcatcgccaagggtacgccacagcagtactggctggcacgtgccttcctgctcctcgccgactgctaccacaagcagggtgagacctatgtcgcccagcagtatctcgagagcctgcgtgacaactacaagggtactgacgatgatatcgctcagatgatcaacgaacgtctcacctcctaccagaataagaaatgaagaagcttgcaatcatccctatagctgctatcgcgctcctctcgagctctgtactctctgctcaggaggctaagacgaagcgtgccgataccctgcgtcgtgagcttactgtgatgaccgaggaggaggtctctctctccacgcgtcagccccgtgacctctcctatacggtgccggctcccaacctcagccctgtgcgtcactcctatctggatacgcccatccccttcacgctgcgccccagcgtctcacccttaggtgctctgacggctccccgtgggggctttgagcgctcgaagcagcgtggctatgccttcgcctctgctggtatccccatcagcttcaaggcgggtgcgggcctgagcatcctctcgacgaagaccgaccgcctcgatgtttatgggcgctacaacttcgccaaccccagcatccagaccgagcttggtcagagagtcaagggctgggagaaggcttggcgcctcggtgcgaactacggccatcagttcgaggacgctgcgctgtcactcggtctggacttcggtcagcacggctacaactactacggcctctcgctcgtcgctcctccagctggtggtggggtggcgcagtctgctacggtgcccgacctgcgtcgtcgtgccacggaggtctcgctctcggctcgctacgctaccgaagaggacttcaccgaagactggctgtatgacttctccgctggctttgactacacggcagctaatgtcgccgaggaagctccaggcgtggtgctcaataagttcaaggagttcctccccgagcttcgtgcgaacctttcctaccgcatcagcagcatggcgcgtgtcggtgcgctgggatcgtggtcgctgggccgtctgaccagcacggagcctatcctctatggcttccctcagagccgcacggccagctcgcgtatgatcctcacgggtgcgccctatattctggccgaagatgctaatgaccagctctcttggcgtgctctcggaggtctgcgtattctcacggggaatgaccactacaacgcccacttcgtcctcttcccgaagatcgacgctcgcctgcgtctgggctcggcctttggcctgcgactagagacggatgcctctctcgtgcgtcacagcctccgtgctcagcccctcgagtcgcccttcatcgatgccgaggcgttcgctggacgctatgagcgtgtctacgatgctaagctgacggcttctacgacgatcgcaagtgccttctcgctcgaagccttcgtccgctatgctgaccataagggtgctgtggattacttccccgcatcgctggcgctgccttcgggtgctgcggcttcgacggcctacttcatgcccgtgcgcttccgtccctcttatgtggactataaggagcagaacgtcggggtgcagctggcctacaaccaccgcggtctcttctcggcagctctgcgtggggtctatgcccactatacgacgacggctacgatcctctcgcgtcctaccttcacggcctcagctctcgtggagctgaatatggtgcccaacctcagcatccgtggtggctatgagttcgccacggcactgaagagctatgacctcgacggctctatcacgcgtctgcgtcagctccatctgctccatgccgatgcagtctactcgctgacgaagcgtctgagcctgacggcagagcttcgtgcacctatcctcgctggggctacgcgctggtacggctatacgtcgcagcctatgctcctgcagggcggtctgcagttcaccttctaagcggatgcgggggcctcccccgcgtcttgcctaagctaaaagcggtacggccgccttgagcatcacgctcgaggcggccgtaccgcttttctttcgtgtggacttcgccgtaaaaggcgcttagaagccgcgagtgatcataccgctaccgaagcagatgcggtgctcggtgtcgtagagtacggcatattggcctggggcaatgccttggataggctcttcgctctcgatgaggtagcccgaggcgggatcgtaggtgagtcgcccgcgtgtgaagtcgggagtatggcgcaccttgaaggtaatctccaccgactcctcacgggagaggggagcatccagcccgcgcacctcggcggcgtactgccaagggtcgtggctgatgaagtcgcaggtctccataccgatgtgctcgccgtactggtcggcggggtcatagccctgactgaccaggatgatattgcgacggatgttcttcttcacgacgaaccaggggccaccactcagcccgagacccttgcgctgaccgatggtgtggaaccagtagcccttgtgcttgccgaggatcttccctgtctcacgctcgatgatgagcccttccttctgtccgagggcgcgctcgatgaactcgttgtagttcaccttcccgaggaagcagataccctgactatccttgcggttagcgctcagcagatgcgcctcttcggcgatacggcgtacctcgctcttgaggaggtgaccggtggggaagaggagcttggagacctggcggaagttgatctgcgcaaggaagtccgtctggtccttcacggggtcgggagccgtagccagatagagctgatcaccgatgaaggtcgtcgtggcgtagtgccccgtagcgatgaagtcgaagtccttgccccacttctcctcgaagcagccgaacttgatgagcttattgcacatcatgtcggggttgggggtgagaccacggcgcacggtgtcaatggtgtactggacgacgttcgcccaatactcgtcgtgtagcgagacgacctcaagagggcagtcatagcggtgtgccagatggcgcacgatctccagatcatcctcccacgagcagtccgtgaagcccttctcctccataccgatctggatgtagaagagggtagggcggtagcccgcctcggtgaggaggtggacgacgacggagctatcgaccccccctgagacgagggcggcgatgcggggctcggtgagcccacttcggcggatgcgctcctgtaggggcgctatgagatcttgcttctgcatactacaaaggtacggcaattcccgtgctctgtggcgaaggtgcttcgtgcgccctttcaaagagccagggggatatcgagagcatatcatcaggaggggcaggggtgaagctcaagcagtcgggccttcaaacaactactgttctgcacgcgtccgactattgctccgtgctcaatccactattcgtttgtacatcgaatgaatagtggtacggggtgtcatccactactcgtttgcacttcataccactattgctttggaaggctcaccatattaggttgttgctccacgcagggataaaagttgtggacgagtggcagataagtttagactacgtacgtggctctaatatctacgtacgcggatatttggattgacgtgcctggtctttaagactacgtacatagatgcagaaaaaccactacgtgaaggcgctttttccttcacgagaacgatgcttttccctccgcaggataagagaaatacgcgcgataaggcgaagggcttgtgtatctcttcggaaaggggtatcggggagctgggtgtgcgataccttagcactcgaaatagaggacaggactctcggcagtagtctcctcttatattgctcgcatcacgctcccgcatacgatcaagccaagagtgcctattgaagcagtcgctctgtgggggctacacttctccccttcacgcgtcataatgcccgattttgcagcggataagggctgtatatggggcgttatacaaggcactttgccagaaaaggatccatataggtaggtagaggtgggcaataaataccaacaagatggtaggataatgggttactgtttgctctaattttgcaatgccgatagtacacattaattttgcaatgcctatagtatacattcgatctctaactcagccgatagcgaatgaatcaaacctctacctcctgataagagctgtaagccacagccatatctctgactaccatctcataggtgagcgagccatatgcccgcgccatgaagcggcctcacgaccttgacgagcccctcctcaccgacctccttcctattatccaaccctcctaagataggagtgatcacacaccactccgccctccccacgactatgtggaaagcaaactgtaaacactacactatgggctcggtacgccttggcctcttcggtctcgtactcacctccgcccttgccctcgcgccccatcccctcggggctactactaccgaggagctcgcccccgcagagcaaagtgcgcgggagcaactcacgatcaccatccttgaccaagccacacgccagcccatcatcggggcggtcatccgctgtgctacggcggtgagccctacgatgacggacaaggcggggcatgccaccctgcgcttccgctccgctcccacgagtatccatgtcgagatctcttgtgtaggctatcagcgcctctcgcgtacggtcgctgtccccgcctcgcgcagcatcaccctgcagatgcaggaggatgcgcaggtcatctcgaaggtcgaggtcacggcgcagaagcgtcatacctctaacctccagcagacggcgaccatcgaccgtaagaccatcgagcgaggaggggctacttcgcttgccaagcttctggagaccgtccctggtgtcagctcgattagctcgggtagcactatcgctaagcccgtgatccaggggatgcacagtagccgtatcctgcttatgaataatggtgtccgtctggagagccagagctggggcgccgaccatgctcccgagctggactatacgggctcgagtatggtagaggtcgtcaagggtgccgagtgtatccgctacggcttcggtgctatggggggggtcgtccttctgaatgacgcgccgctaccctttggcaaggagaagatcgaggtccacggcaaggcgaacgtcggctacgacaccaatgcacgaggtgtcagcggttcggcaagcctcgaagcgggctaccgcaagtgggggcttcgcctgcacgggatgtacactaaggggggcgactacagcaccgccgactatatcctcaacaacacgggctacaataccatcagcctctcgggagcgctcggctaccacgcctcacgcgtgacggcgaccgtctactccagcctctactaccagcgtagcggtatctattacgccagcaagatctccgaccttgatcagctcgtcaagcgcttcgagtatgggcgccctgactcatcgaccttccgccccttctcctacgatatcaagccacccttccaacagtcgcagcacttcacgctcaagggtgaggtgaagtggaatctgagcgataaccaccgcattgacttcacggcctcgttccaagagaacctccgacaggagttcgagaatcgtaagaaggccgactggagctggatccctatgcaggacctcattctcaagaccttcaaggcggatgtcctctggcacgccaagtggaatcgctgggggatgactaccgatgtcggtacgtcgaatacctaccagacgaactacaactaccctgggacgaagcagcctgccttcgtgccgaacttcgctgcactctcgatggggggctacttcctccacaaggctgagctgggcaagctccaggctgcactcggtatgcgctatgacttccgcgtgatgtcggtcagtggctacaccagcctgagtaactatacctactacgacgacttcaagctgtatagcaacttcaccacgagcctcgccgctcactatgatatcaatcagaactgggatgtgcgtgcgaatatcggctggtcgtggcgcccacccgatatcaacgagctctacgctatcgggctgcaagacggctcctattgggtcgaggggaatcgtaacctcgccagcgagcgtggctataagtccgtcatcggggcacgctaccgcaatagctggatctctatcgagcccagcgccttctaccagcgcatcagtagctatatctacgaccatatcggcgcagggaaggaccgcttccacaaccaccccagcgggaagtacccgaagttcatctacgaccaagacgacgtcaacctctatgggggcgatatcgaggctacggtgcacccactgcctgggctcgctgtcgtagggaagggcgaatggatgttcgctcgcaatatcacgcgtcaggactggctgcccttcatgccctccgaccgctacggcctctcggggacgtatgacttcgacctcacacgggataagaagtaccacgcgtccgtctcgctctccagcatctatgtgacgaagcagcgtcgcttcgacccagacaaggacctcgtcagcgactcgcccgatccttacttcctgctcaatggtacggctgaggtaggcgtgcgccttccccacgaccactccctgcgcctgatgctcgtcggggataatatcctcaacgccctctacaaggagtacaccgaccgcttccgctactacgctcacgcccgtggcgcaaacttctcgctgcgtgtgctctataagttctaatgactgcgactatgaaatccatcatatctcactacctcctccccgctctcggtgtagcttgcctcctcgggagctgctccaatgagcgtgtagacgccttcttcaagaagatcatccaggccccgccctccgagatcgagcgtgacgtcaagggccacgaccagatctatgccgtgcatgcgatcctgcgcatgggctataaggcgggccagatcggtgtcggtgcgaatgccgacgagatggtcgatgtctacaacacctatcatatcgcaggcgaagagaccgtcatccccatcgtccaggagatcgatatcgccaaggatgacaacggacagatgaccgtgacgacggagcgtgatcacttcgatgtcgtcgcctcggacaagatcgtctacggcctcgagctgaagtactacgatcagaacgggatgctcatcaatcaccagttcacgaacttcccctatgtcaaggggaaggacggctacagcgagcctgacgaggacaactccacgctgatgatgcaccagcacttcttcggtgtcgggcactttaccctcagcaagggctcgaaggatgaggctaagacgctccagctcgcttacccccgcacgctggccgatgtaccgcactacatcgaccgctataccttcatggagcgtgggggcaaggcagagcctgcgacgaagttctccgcatcgaatatctacgtgcccgatggcttcgagctggggcgcaatgctgtgcctttcgacaacgaactcgcgtggcgctctatcgaggtgacgggtcgccccgatgccctccagcccttccgtgcctccaatggtacgatgtaccgcctcgtgcgcagcatcgacaaccagcgcctcaatcagctcgtccccgagatcttcacctatacctaccgcgataccgaccccatcgaggaggagctgggtaagctcttcgacgagtcatacaacgatgacttcatcgaccccgagacggaggctccccgtcagcgctatggcgagacagtgggtctgctgaagcaggagcgtagcctcgatgctggggcgccgctcgaccgactgggcttcaaggggatcttaaagttccgtcaggcgggtatctccttcctcctgcaggtgcgtctgtgtaatatcctcaccaagggtcagcagcgtacgggggatgtcgccaagcccgcgaagtacaccaatgccgcgaaccccgatgggggctacctctgggactttaaccagatccagcctggctgggatagcttcgacattgactacccgctacccgtgcgcatcatcgccgatacgaaggatggcgaggcgaagtgctacgaggacgtccgccgcttctacccctcggtacagcgctcagaactctggcgtatgctctccgaccccgaagccttcttctatcgctatcgtcgcaatgtcgtccttatgtaatgcccactcctcactatgaatacttctatcagtaagcacctcaagcgcgccactgtccttggcctcatcgccttctcgctcagtgcgtgcgataagttcgtcttcggggacatccaccccaactacgacgacaaccctctcaacacgaagaccatcccccacagtggcgccgaccactacgtcgatagtatcacgaagatcaaggtcaccgaagctcttgccaaccccgatcccgagggtgcgttcaaggactgggcgacgtgtctggtgatgttcaaggaaggccactcccacggtgacggtatgatgcacgggaacttcgtctacccgaatgccccctggaagcaggaggagttcgtcatcatccacaacaacgctggctcttggcctaccgtcgaggtgcagcgtcagagcacggtgacctacctcgagcagtacgacaagaagcagggtcccgactacatccgcatcatcggtgggcgcctcaagcgctggggcctctgcctctatttcttcgataagaatggtcgtctgatgaatgatgatatcctggatcactccgacgagtaccagatcttcttcacggtaagcgatgtcgatgacaagggtcagccctatgaggtgaccgatacgcgcggcacttggcaggctaagtacgacgagtacgatacctggcagcctggcggtacgatcgaccacacgcctgtgccttcgcccttcttcgcgaataagactacgtggaaggagcgtgctgatgccacgccgaagatcttcgagtacacctaccgcgacacgtggatccacgatgcgatgggcgatggtgcgcgcgagctcttcaaccagcgcctcctccctcctctcacgcgtaaggaagccgactgggctgtcgctccctacgaccaagaccgcgtcgggctgaagggtcacttcaacttcgatatcgatgcagatgagaatgacgacaagcacaaggactggccgctcgagatcacacgccgtaccgaccccacgacgggtaagggtgggcgctatacgcgtccctcgttcgtcctgccgaagttctacctctcggtgcgcgtcatgaagtgcccgaagggcaagaaggcgctgatcccgaaggacccttatctcgcacgccactctacctacgtcttcctcagcaagttcatctgctcagactggtacaaccccgacgagccaaaggactatggcgcagactcgcagtggaaggatgtcctgcgcttcaacatccctatcaaggtcttctgcagcagcttcgacaccgaccccacggccattgaccccaatgacccctactactattacctcggccgtgagatcggcctcacagcagaggaagctctcgaggcttcgcagaatgtccagacgcacggcatcggtggtggctcgggcttcggcaactggttcctctaatcatatcttcactaaataatcttcagctattatgcgtacacacatatatcgcttcgcctttgcgatgctgttcctctcggtattgatgtcctgcgctcgcaacgaagcccccgagcgtcgctccgattcacgctctactcttgaccacttggttatcaaggaggtcttctatattgggcatgcctatactcaggatttccccaaagagtatccccagccatcgaggcagaattggtatgctgatgatgcgtacatcacgatttataatcctacctcagaggtcaagtatctcgatggtcttgctctctgctccacggcacttgacccgtctactttacttgagttcgaagggaacaaggacttcagacgggagtatctcggagtgggtactatctcatacttccctggcagtgggaaggagcatcctatccagcccgggcaaacggtagttatcgctaagtatgcgattgaccacgccaaggacttcttcactcgtctcgataaggagctcgccgctaatggagaaccccctgttgaccacaacctgtacaagggaatcgaagcgttcttgaatctctcgaaggtggattgggaatggaccaatgcccaagccgatgacgagcataaaaacaacccgaatgtaccagacctcgtccccatcttcacggggtatgatgccgaagaggatgatgacgtagatttcggatttaaggaggttaccgagacgagtggtatcgctctgattcagctcccttggactgctgaagacttccgccagaactacccagatgccgagggacgccgtggctatagacatacgatcaatgctcgtattacccaccaccgcaatcgtattcacgtcatagaaattccctttgacaaggctatagactgcatcactatctgccctaagcaagaatataagtttaacccctatagcaaggagcctaaagcgacctttgataagggctataatgcagtcacagatggggcatataagaggacgcctgcaagcgactggaagaagtattccggtatggctctgattcgcaagtgggatggtaagaagttagtcgacgataacaactcgaccagcgactttgctgtacagcctgcttcgctcggatcgaagtagccgattccttcagagaagtaagttgctattaaggcttcattagccttatctatagcctctcacgaccttgcccccatgactattgaagtttatggggatgggcttcctctaatctcctcacagcattatatccagctatgcgcacttatatatatcgcttcgccttggccgtggtgttcctctcggggctgatggcctgtactcgcaacgaagcgccccagcgtcgctcgaactcccgatcctccgtcgaccacctcatcatcaaggaggtcttctacatcgggcacgtcatcacgaagagcttccccgaagagtggggatatcctcccgtgaagtcgtggtatgaagacgaccagtacatcacgatcttcaaccccacctcggaggtcaagtacctcgacggcctcgcactcagcaccaccgccctcgacccttcggacgagcgtaccttcgcagggaaggaggacttccgccgtaagtatatcggtgtcgagacgatctcttacttccctggcagtgggaaggagcatccgatccagccagggcagacggtcgtcatcgctaagtatgccatcgaccacgccaaggaatatttcgttcgtctcaataagcaggccgatgattatggcgaagagcgtgaggatcccaagcgctacaaaggcgtggactccctcatcgacctgacgaaggccgactgggagtggacgcacagtgactacgacccccagcatatgaacaaccccaatgtccccgacctcgtgcccatcctcacgggcgtagataagaagggtgcgaagtactcggacttcggtatcaagcagatctctgggcagaacggtatcgccctcatacagctcccctggacgcctgaggacttccgcgagaactatcaggataccaaggagcgcctcggctaccgtcactatatcaatgtcaccaacagcctcttcgccgacttctacgctatcgagatccccttctccaaggcgctggactgcatcaccgtctgccccaagcgacgctacaagatcaatccctataagaataccttcgataagggctacaatgccgtcacggaggtcagcgcaaagaacctcccgaagagcgactggcagaagtactccggcctcgctctgatccgtaagtgggacgggaagaagttcgtcgacgacaacaattcgaccagtgacttcaccgtacagcccgcctctctcggcttgaagaagcccacgacatcggagaagtaatccctcctccgaagcaccggcttcctcatctacattctttatgccctcgccccctcgtgctctttgaagccgtgggggcgaggccttttctatgccatcgccctaattattacgtacttttgcaggtgaattcttaaacgaatcagattatgtattctgtagaagatataagagcccaattccctatactcgcagcggaggtctatggtaagcccctcgtttacctcgacaatgctgcgaccactcagaagcctcgctgcgtcattcaggccatcgaagaggcctattattcggccaatgccaacgtccatcgtggcgtgcactacctcagccagatcgcgaccgagcaccacgaagccgcacgccgccgtgtcgcggacttcatcggagcgccctcagccgaaggtcttatcttcactcgtggcactacggaggccatcaatctcgtcgcatcttctgctggcgaagccttcgtctccgctggcgacgaggtcgtcatcagcacgatggagcaccactcgaatatcgtgccttggcagatgatgtgcgagcgtcgcggggcgcatctacgtgtcattcccttgacgcccgtaggtgagatcgatatggatgcctaccgctccttgcttagcgaacgtacgcgccttgtcgccgtcgcccacgtcagcaacgtccttggtacggtcaatcccgtagccgaaatcacgcgcttggcccacgaagcaggtgccctcgtcctcatcgacggagcgcaggccatcgcacatacgcgtgctgacgtcgaggcgatcggggcggacttctatgccttcagcgcgcataagatctacggcccgacgggtatcggtgcgctctatggacgtcccgaggtgctggatcgtatgccgccgtacatgggtgggggagagatgattgagcgagtgaccttcgagaagactacatataatagcctgcccttcaagttcgaggccggtacgcccgactatgtaggctctaccgccttcgctcgtgcgctcgacttcgtgacggagctgggcatcgaagccatcgcagcgcatgaggaagacctcctgcactatgctacagctcgccttaagagtgaattccccgatagcttcatcctcggcgaagcacccaataagggtggcattctctccttcggcatcggggagatccatccctttgacctcgggacgctcctcgaccgcatgggtatcgcgatccgcacggggcatcactgcgccgaaccgctcttggcatcctacggacatcaggcggtggcacgcgcttccttcgggctgtacaacacccgtgaggaggtggaccgcttcttcgacgccctgcaccgcgtcgtccctatgctgagctaagcccccgcttacgatgagtaggtctatgaagtcagtgaaggaacacgcacccctacgcgtgagcttcggcgaagatggccgtctggagtgtggctgtgatgaggcggggcgtgggtgcttagccggccccgtcgtcgctgcggctgtgatcttgcccccgactttctaccatccactactcttcgactccaagcagctctccgagcgtcagcgcgacacgctccgcccgatcatcgaggaagctgctctggcgtggggtgtcgggatcgtctcccccgaggagattgatgagatcaatatcctgcaggcctccttccttgcgatgcatcgtgcaatagacgacctactgcttcgccccgagctactccttattgacggcaaccgcttcaagccctaccacgacatcccccacgagtgtatcgtcaagggggatgccacgtttgcaagcatcgctgccgcttcgatcctcgcgaagacgcaccgtgatgagctgatgctcgccgaagacgcccgctacccaggctatggcttcgccgggcacaagggctacccgacgccagcacaccgtcgtgccatcgctgacttaggcccgtcgcccatccatcgaatgaccttccgcttggtctgatccactccttatatataatgtatagcgccccgctgcatggctgtgtgtatagccagcagcggggcgcctactattatgtaggtagtgaaatcgagcagtactggtcggtggtcggagcagtactggtcacacggcgaagtagtactggttactaatagcaaccagtagtggttggaatggtgaccagtactggttgctttctactcttcggagggggcgtgggaaggctgcctttagtagggtggtgtgattctatattggtcggcgggtgaagctatataggtcacgaaagcaatctatataggtcgaagtgccgacctatataggttcgtccgccgaccaatataggatgatatccctcttgcctatatgtattgagtagggtaggggggtatgcggaggctttccccttcccgtacgcctttcatccccgccaaatactgcgcctccctattgccctcttacacctacttacagagtgtgtgctgtgcttcaatagttgtttgggatcaaacgactattggtttggggtgcgaagcactactcgtttgctactcgaataagtagtggtttgcattcaaaccactattggtttacccgcgaatgactattggtttgccccacgtccccatatcactacacagccgtccccactcctctttgcccttcattcccccgccaagcggacctcttccccgctcaatcctctcgttcttcccccgcgaaatcgcccatctccccccaagagaatgaaattttttttgccccctgtaactctcttgcttatggggaaatgagtacaactcaacgggtgttcttgagaaatattttgcggtaagatttggtttgtatttagtttttgctctatctttgcaaccgcaaacgagaaacgaaccgcctcgaagaagagctgacccgagcgagggtagctgaggaagggaagacagacgttagcgaagacgatatgagtaaggtgacttacttatgattgactcaaggaggagtcacaaggttaacaccagcggccctcttagcgatcattgacatacttgataaaaacaaacgagaaaacaacgtagagcatatataataagttagtatacaacctgcgtgctttctattaatagaagtacgttaggcgcaaaaacagataagggcagacggtggatgccttggctctcggaggcgacgaaggacgtgataagctgcgataagctacggggattggcacatacaaattgatccgtagatttccgaatggggcaacccggtacattgaagatgtatcacactgcagagcagtgagcgaacgtggggaactgaaacatctaagtacccataggagaagaaaacaaaagtgattcccttagtagtggcgagcgaacggggaacagcccaaaccagttttgtttcggcaaaattggggttgtaggacctcgatataggaagacaagattaggagaacggtctggaaaggccggccatagaacatgacagctgtgtatccgaaaatcttcgttggacttagaggtatcctgagtagcgcgggacacgtgaaatcctgtgtg

SEQ ID NO: 74 - DNA, 124029 bp, Porphyromonas bobii
  source 1..124029: mol_type = genomic DNA
aaactcttcattgtcaatatttttattgtactttgttctgtttgtcttgctctaaaaatgattcttgcttcagatttattagtgtatctctacctaagtaaaggtcgtaattgacggttaggtcttcatttccctaaacgtttgttactacacttctgtttgtcaatatcaattatctcaaagatctctcaaagtcaaaccacccgcgtcaccgctaggccgttcgtttcttttgcgagtgcaaaggtaaagcaaagttttcactccaccaaatctcgagtgaaactttttcgttaccactctcgatctaaaccctgtcattcgctgctcgtccgcctgacttgcgactgcaaagatacggcaattcccgccgaatttccaaatctaagcgtaagattctcacgactttctcaaaattccacccctttcacgcgcgtacattatatataagcgagcaatacgaaggtgcattgcgacatacataagctttgcagatgaggggaggagacttcttacgagaggggtgatatcaacctatatagatcgctgggctgacctatattaagaccgttgccgagagtcctgccctctacttattgtgctaagacatcgcgcactcagctccccaatatacgtctccgaagtgatacgcaagcccttcgccttatccgcgcgtattccacttatccagcagaggagaaagcatcattctcgcgaaggaaaaagcgccttcgcgtagtggttttcccgcatctatgtacgtagtcttaaagaccaggcacgcaaatccaaatatccacgtacgtagatattagagccacgtacgtagtccaaacttatctgccgctcgtccacaacttttatccatacgtggagcaacagtctcatattggtcagcgggtgaagctatataggttggcgtcgtaacatatatagatccgtgagtgaacctatataggatcgcccagcgacctatataggttcgtaccaccccaccatagagcttggatgaggtcgcttatatatcaagctaaacttcagtacgatagactcacgctcatcacagggcaccataaggcagcatatcggggtgagaattgcagtacctttgctggtagaagaattggtataagattgctttgaaataagaacagcaactatggctacaatcaaatgtataggggtactgacctctggcggcgatgcacccggcatgaatgccgccatccgctcggtcacccgcacagctatctatcacggcatccgcgtcaaggggatctaccgcggctacaagggactgatcaccggtgagatcgaagacttcgagacacagcacgtgagcaacatcatccagcgtggggggacgatcctcaagacggcacgctgccccgagttctgcacgcccgacggtcgcgtcctagcctatgagacgatgcgcgcccacgggatcgatgccctcgtcgtcatcgggggcgacgggtcgctctctggcgcacgtgagttcgccgaagaattcgacatccccatcgttgggctccccggcacgatcgacaacgacctctacggcaccgacctcacgatcggctacgacacggcgctgaacaccatcgtctccgccgtggacaagatccgtgacaccgcctcctcgcatgagcgcctcttcttcgtagaggtcatggggcgtgaagccggcttccttgccctcaacggcgctattgcttcgggggcagaggctgcgatcatccccgagttcgcctttgagaaagaccagctcgctgagacgatcgagaacggcttccgcaagacgaagaatagcagcatcgtgctcgtctccgagagcgagagcacgggcggagcgatgaaggtcgctgagcgtgtggagaaggagtacccacaattcgacgtgcgtgtcgtgatccttggtcacatccagcgtgggggctcacccagcgcgcaggaccgcatcatcgcgagccgtatgggcgtcgccgccatcgaagccctccttgaggggcagcgcaacgtgatgatcgggatcgtcaatgacgccctcgtatacgtgcccttctcgaaggcgatcaagaagaacaagcccatcgatacggacctcgtcgaggccctgcgtatcctctcgatctaagggaagtactcccctaccctcacacgcttcgccgaagcagggtaaaacaaaagcacgagcggtcgcaaagcaatagatgctttgcgaccgctcgtgctttatgcgtaatgggagagtgcgggacttacagctcgcgacgcaggcgtgccacagggagacggagctgctcacgatacttcgccacggtgcgccgagcgatgggatagcctcgggccgcaagcagctgagtgagctgctcatcggagagcggctggcgcttgtcctcacctgcgatgagctcagcaagagcctcgcgtacctcacgggtagagacgctctcgccttcgtcattgaggataccttcgccgaagaagaacttcagcatatagactccgtagtcggtctgcacggacttgctattgctcacacgagaaatcgtactgatgtcgaggcctgtagcctcggcgatatccttgaggatcatcggacgcagagccgacacttcgcccgtgaggaagaaggcacgctggtgctcgacgatggcagtcatcgtcttacgcagagtctcctcacgctgatgaatggcatcgatgaaccagcgggcctgctcgaccttgtgacgcaggaaggtcatcgcctcacgactctgacgcgagccgtcgcgctggtccttgtgctgctccagcagggcaaggtaggtgggacttaggcgcaaggggggcagatctcgctcaccgacgagtgaaatcaagagctcgccatcacgctcggtgacgatgaagtcgggggtgatgtgcataaagcgcccttcgctatcatcgccgtagccattggctggcttggggttgagatgcgagatgaaggtatagagctcggagagacgctcctcgctcacgccgagggccgcacataggcggtcaaagcgcttattgacgaagtcctcgtagtgatgctcgatcatacgctgcgcctcacagtgcagggggtcagctggcaggcgctcgatctgcaagagaagtgactctctgaggtcacgcgcaccgataccagcgggatccagcgtcttcaccagacggatgagttcggcgatctcttcggacgtgacggagaggcctgccttgaagagcagatcatcctcgatctcctcgacagagcgtgtcagatagccgtcgtcgtcaatgttcccgatgatgtagcgtgcgatctcgcggcgcgtcccctccagcggagtgacgagcgcgagctgctccatcaggtactcatcaagcgaaggggcaccagccgcgaaggggatctcttcgcggaccgactggcgctcctgcagctcacggagcttgtagtcggggatatcatcctcggtagcgtattcgccgagctcccagtcttggtcgtcgctatcggaggacgtcgactcgtcgtcggagccttcttgctggggcgcctcgtcgttctcttcgagtgcagggttctcctccagctcacgctcgatacgtgcctccagctccagccccgtgagctccagcatcttgatggcttggatctgtgcgggcgtgagcgaaagcgattggtcgagcttctgctgctgagtgagcttattcatcggcggtagggagcgaagaggatgagggaaaaggcaggtaggaggtacgagctacagatcttcgtggtcgtaagtccagacgatctcctcgccgttgatgcggaagacctccttacgtgccagagcgaagaagtagtcactcagacggttgacgaagcgcaggacattcacatccagcggcgtctcgctattgaggcggtagatgatgcgctcggcacgacggcagacggcacggcagacgtgcgcagcggccgtgatcgctccacccgaggggaggatgaaggccttgataggtggcaccatatcgtcgaggcggtcgatctcacgctcgacacgtgccacggcgctctcagtgacggaggtcacggtgtgcacatcgtcctgcgtggtgtcggtagcgaggtagccaccgacggagaagagcttgtgctgtagccagaagaggaacttcttatcctcctcctcgagctcataggccagcagtacgccgacgaacgaattcagctcatcgatcgtgccgtagctctccagacggatgtcgtacttgggcacacgctgcccaccgaccagggaggtgcggcccttgtcgccgcccttggtatatagcttatacttctcggtatccatagtgataggggtaaggcggggtgatgtacccgctctgtagagataacagcgctaaggctctaaaagatacatcggcgaagcagtcgtgcgcttcagggccgtgagcgagaggtccttgcccacgcgaataccctcggcgaagaggcgctgctcgacggtcttccagcaaagatcggggtggttgttgtccttactcaggtggcacagccagacgttcttcatacccgtgtgatagacacgagcgaggagttcggccgcctcatcgttggagaggtgcccctgcggcgaggcgacacgccccttgaggaactccggatagctcccactgcgtagcatctcggggtcgtagttcgcctcgagtaccacgtggtcagcacggccgatgtagtcggcgatatcgtcagtgacgtgaccgacgtcggtagcgagcgtgaagcggaagtcgcccttcgtgatgtggtagcccacgttctccgcgctgtcatgcggcacggggaagggctcgatagtgaagcctgctacggtgaagggctcgtagatcttgatctcacggcgcgaggggccgatagggtcctgcacgaagcggctattggctatgctgtcgtgcaccagccgcgtggcgtagacgggcaggtgatagacgcccccgatgaccccgacggtacggatgtggtcggcgtggtcatgcgtgacgatgaccccgtggatggcaccgccgtcgagcgggatgccttcagccttgagggtcttagtgatagtacggatagggatccccgcatcgatgaggaagccccccgcctcgtctcctatgtagtagcagttcccactgctcccactggagaggcacataaatcttatcattcgtggatctgggtgtagatacgtgtcgcctctatcggcgatagatggagatctcgcgggagaagccctccatctcctggtcaaggctcatctctccgcgcagagggatggccatcaagcggctgacctcctcgctgctgaagccctgaccgaggaggtacatcagcttcgtcagtgcggcctcggtcgtggcatcacgcccgctgaccagaccgatcttctcgaggaggacacccgtctcgtagcgcgtcatatcgacgtagcccgtgacgcactgcgtgacattcacgatgacgacgccacgtgccacagcggcacggagtgcatcgaggaaccaaggcatcatcggcgcattgccactgccgaaggtctccatcaccaccccgcgcagcgaaggcacggagaggacggcttcgacgacctcgcgtgtgataccagggaagagcttcaagaccgccacatgaggatcgaagtacgggcgcaccgaaagcgtacgccccacatgagcgtttgcgatgacggcgtcgtggtagcggatctcaataccggcataagccagatggggatagttgtacgactcgaaggcgctgaactgatcggcgctgatcttgctcgtgcggttgccacgcatcagatagttctcgaagaagagcgatacctcaggcacacgtggacggcctgcttcgtcgcgtgctgcagcgatctcgatagcggtgatgagattctccttcccgtccgtacggagcttccctacggggagctgtgagccggtgaagacgataggcttcgcaagcccctcaaagacgaagctcagcgccgaggcagtataggccatcgtatcggtgccgtggaggatgacgaagccgtcgtacttatcgtagttctcctcgatgacacgagccagctgtacccagtgctcggtagtgatagccgaggagtctagcggtggctgaaactccacgctggagatatcgcaacccaagagacgcagctctgggacgttgtcctgcaggtaattaaagtcaaggggttcaagagcacccgtctcagggttctcaagcatcccgatcgtccctccggtgtagaccaagaggatagatgcgcgtggtgcaaccatattgtagtgtagttgtaagcacattagcggggcgaagcaaagccttttcaagccccgtcgcccccatgtttattctctacagacaaagataacaataatataccgccattcggcttcttagcggggctcttcttagggctcgtaggggagcggaatataggatggcgaagaaagctatatagctttggactgattcctatatagcattcggtgcgaagctatatagctttgtgaagtgacctctattaggttgttgctccgcgtagggataaaagttgtggacgagtggctgataaggttgatctacgtacgtggctctaatatctacgtgcgtggatatttggattgacgtgcctggtctttaagactacgtgcgtagacagaggaaaaccactatgtgaagacgcttttttattcacgagaaggacacttttccctccgctgaataagaggaatacgcgcgatgaggcgaagggcttgtgtatcacttcggagaggtgtatcgggtagctgggcgtgcaataccactctaaaaggagggcaggactctcgggaacaggctccgatgacgagcgaatagggataggccggatacaacttcccccgctatacacccgacacacggggtatagcgggggaggagaaagaaagtgaagtggtgcgcttctatcccttagaagcggtaggtcgcagagaggctcaagtgacgtggcgagccagggaaggagcgcagacggtcgtagcccgagacgtagtagcgcttatccagcaggttattcgcattcagctggagctgtacatcgcgcaccttatagtagagtgccgcatcgaggaggacatagccagggtagctgacgacgttggcacggcggccgacctgtccgaggcgctcactcacgccatgcacaccgaagccgataccgagcccttcgatagggccttgagggatgacgaacttcgtccagacgtttgccgaatgacggggcgtaccagggcgctgcaggttgaggtccttcgtcccatcggcagccttagtgatctcagcgacattgtagctatagctggccatcacgctccagtagggtaggatcttcccagcgacatcaagctctacgcctcgcgagagttcttcgccgatgggcaccatgcggttgggctcacccgtgatccccgcattgtagagcgtattgcgctggcggaggctgaagaggctgagcgtcgccgtgaggcggctatcgaggtagtcgcccttcgctccgatctcccacagctcactctgcacggggtcaaaaggccctcccgaagtaggatcactctgcacggagaccgcctgaggctcgaagccacggatccacgtagcatagacattggtagagggtgtgataccgtagaccaagccgacacgtggggtgaaggcatgctggtgcgtgcgggtcttcgctcccttggcatcctgcacgacgtcggtgaaccactctatgcgagcaccgaggaggagctgcaggcgctgccatgagagctgctcctgcaggtagatcccattggtgtactgatctgaggggcgtacagccttcgactcgtagatgtacttcgtgacgtcttgatactgattgccgacggtggagttgaggtcgaaggcagggacgttcgtacgtgggttgccgtccttatccaggaggtacttagcgatatcagccttcttgaaggtcttggccatgccaccgttagctaagaggtagccgcctgcctcgatgtaggacgagcctggggccagctgcgtattgaagtggtcgtagccgaagaggagcttgtgctggacggctcccgtagcgacattccacgtcaagtagttattgaaggcgtgattgcggaagttgcggaagcgcttggtcacacgcatcaggacgagggcggggtcatccgtgccgtccgccttcttgacgaaggcattatcctgcgagtgctccatcatatcctcgctgtaggaggagtagaggtaggtactattgaagaggagcccctcggcgatctgatgcgagagagcgaaggtcaggttcagcgtctgctcacgcagatagtcattggctgccgactgcgtagaagagagcggacgagagaagagatccccatcgccgaagatcgcgacgccacggtcgagcttccccgcactgctggtgtacaccaggtccacattgaggcgagtacgatctgagggcaggtaggtgatcgagggggctacgatctgcgtcgtaagcttctgcagatcacggaaggtatccgaattctcatagccgagattgaggcggtagaggagcgtcttgcgctcattgagcgggcccgtgaagtcggcataggcgcgactcgtattgaagctcccagccgtcagcgataccgagcgacgggctatattgaggggcttcttcgtcacacgattgatgacaccaccaggggcagcattcccaaagagtgcggaggcagggcccttgatgacctcgacacgctcgatattcgccagcgacgactgacgccagaggctcgtctgagcacgcatgccgttgaggagattccctgagttgcggttccccgtagcacggaagccacggatcgagaagtcattgtagaaggagtactggttgataccgctgatattcttcaccacatcattgacggtgatggcaccttggtctaagacaagctccttcgtgacgtatccgatagactgcgggacgtctcgcaggagtgtcgctgtcttcgtcccagcgaaagacatcgcattgcggtacgactgctcacggcgcccgatgacgtcgacggtaggcagtgcctgctcgcgctcatcgaggatgaagtgcaggtctgtgcctgctccctctccgaggaagaggagacgacgctgcgtgatatagcccatcgcctggatgatgacaggctggcgtcctgcgggaaggccgtcgagagcaaagcgcccctccttatcggtatgagcagtaaggcgaagcagtggatcccctacggcgatgaccgctccttcgacaggagcgccatgagagtcggtgacacgaccacggagctgtgctgcagtaggtgtcgcagccttagtagagagggtatctggggtagctacgggcaatagcgtctcgcctcgagctgcagtactccacacgagcagccccaggagtatacatttcttcattgacggatatacaattagtgaaattagggaacggatgtaaatgccgtgcaaaggtatagcgcacacgaggtgagcacaatacctaaaagtgagtatttcacggcctcctatctccccactgctggggtactccgcgacaccgatataaagcgccgccgcccgaccgtctccgtgagggagagggccgggcggcggactattgggggatatagaggggaggcggagcttactgcttaccttcggtctctactgcgggagcgatcttcttgaccagcccctgaaggacagcaccagggcctacttcgacgaagcgcgtagcaccgtcagcgaccatagcctgtacgctctccgtccagcgtacgggagccgtcagctgagcgatgaggttcttcttgatgccgtgcgtgcagttgacagcgtgggcaggtacattctgatagatggggcagcggggtgagtggaactccgtagcctcgatagcttcggcgagcgcgacacgtgctggctccatcagaggtgagtggaaggcaccaccgacgttgaggcgaagagcacgcttagcaccagcttccttgagggcttcgcaagcgcggtcaacagcgtcgacatcacccgagatgacgagctgaccagggcagttgaagttggcagcgatgactaccccaccctcgatggtcttgaggatctcgacgaccttctcatcgggcagaccgaggatagccgccatcgtaccagggttagcttcgcaagcctcctgcatagccagagcacgcttggagacgagacgcagaccgtcttcgaagctcagcgcaccagcagcgacgagtgcggagaactcaccgagggagtgaccagcgaccatatcgggctggaattcgtcaccgaggcagagcgcacggatgacggagtgcaggaagaccgcgggctgcgtgaccttcgtctgcttgagctcttcgtccgtaccagcgaacatgatgtccgtgatgcggaatccgaggatatcgttggccttctcaaagagctccttggctaagggatgattctcataaagctccttccccatacccacgaactgggcgccttggccagggaatacataagctgtcttactcatttactaaattcttcttgtgatgatatacttagggtcttggtatgcgaattaaatcagctccagtgccttgacaaggaccttccaggtgcgctcaacagaggcgatgtgtaccttctcgtcgggggagtggggcgagcgaaggtcaggaccgatggagatcatatccatatcaggcatgacgccctggatgataccacactccagccctgcgtggacgacggtgatctcgggggacttgcccgtgacctcttcgtaagcacggcgcatcgtcttgaggacggcggagtcagcattgggtgcccagccgttgtaagctcctgcaaactcgacctctgcacccgccagattcatcgcgctctcgatctgagaagcgacgtactccttgcggctctccgaggagctacgcagcatgaaggtagcggtgaaggtaccgtcgccgacgaagatcttcgccatattcgtagaggactctacgatgccagggaagtcggtgagcatactctgcacgccattgatgcacgcatcaagggcgccgatgacgccatcctggatctcttcggggatgaccgtcttcggtagatccgtgcgctcgaggctgaggctgatgccgtcctcgatattcttatactccgtctgcagggtgtcaaggaagtccgaagcgaactcccacaggccgtcagcctctgcttcggggatggtcacgagcgcgaaggcttcgcgagggatcgcattgcgagctgagcccccttcgagatgtacgaggcgagcaccgtagctggcgatagcctccttgaggaagcgcacgagctgcttattagcgttggcacggccgaggatgatatccatacccgagtgaccaccgcgcagacccgtcaggctgatgcgcacagcgatatccccttcgggcgtaggctcctgatccttgtactcgagcttgacgttgacgtcgaggccacctgcacagccagcgaagagaagaccttcgtcctcgctgtcgaggttgatgaggatatcccccttagagaagccaggctgtaggccgttggcaccgaccataccaacctcttcgtctacggtgaagagggcttcgagagggccgtgcttgagggtatcgtcggagagaacggccatcatataggctgcgccgataccattgtctgcgccgagcgtcgtatcacgtgccgtcacccactcgccatcgatgtaggcatcgatagggtccttggtgaagtcatgctcgatgtggctattcttctggggcaccatatcgatgtgggcctgcagggtcaccacggggcgtccttcgaggccaggagtagcaggcttgcggatgagtatattgcccgtagcatcatgctgagcctcgaggttcagacgctttgccagagcaaggaggtactcttggaccgcctcagtgtggaacgtcgggcgggggatctgtgtgagatcatagaagtagctccacacgtgagcaggagacagggtcttgatttcagcagccatagtcgattcgttcttaagatgaataatggatagttatgctcagcgcacgctcgcagtgggtgcggtgcgtctgcgcgtgtagtgtctattgatgatgggaagagcgatgatcgcgatgaggcccacgagcgtgatccacagcgtctgcgccgtgtgcacgatgagggcgaagtccttcgcaggctggacagccataccaaaggtagtgaaggtaatgatgaccgcagcatgccacgctcccatacccgcctggacgggcacgatgaccgacatactactcatggcgaaggcgatgcttgccacggagaggggaaggtcgcgcgtagcctcgaaggcaaagagcgcgaagtagaagtagcagaagtacccgatccagatgaggagcgtcaggaggaggaagcgcccgcgatgtggcatatagcggatgctcatcatcccgtcccagatatgcaggaagaactgtgcgatacggctcccacggcggtagcgtaagagccagacgaagcctccaagagcgagcagcccgaccaccaccagcaccaccgaccacggggagtagataaaggcgcggagtgaggcctccagctcggggtgggaggcgaagtaaccgatgaagaagtctgtcgagctgaggataatcccgaggaggatcagcgccagcatcgtcacgtccgtcaggcggtcgacgatgagcgtaccgaagagcccagcgaaggggatgtcctcacggcgctccatctcgacgcagcgccacacctcgcccgagcgaggtatccccatgttcaccgtataggagccgagcaccgtgcagacggcattgatgcgccgtggaggtgcttcgccagcggtgagcgggcgcacaaggagctcccagcgcaagcctcggcagaggttgctcataagtccaaagaggaggctaaaaaggaggatgggatagttgacccccgtgcggagggtctcctgcagctcgtgccagtcggtatcacgatagaggccatagaagcccaacccaccgaggagcagtgggactacaatccagagaatggacttaagggtaggatggatcttcattcgacacacacccactcgagaggcgggcaaagctcgaggctcggcaccacgcaagggagtgtactctaatagctcttaataaattgtactactttagtatagcaaatgtaataagtttttagttatctcccatgcagcaagttaaagccaagaaggcattaggccaacattttctcaccgatctctctatcgccgagcgcatcgccgacagcatctccagccaccgcgatctgcctgtacttgagatcggtcctggcatgggagtgctgacccaattcctcctggagaagggctacgacacgcacgtcatcgagatcgacaccgagtcagtagcctacctcaaggcgcattttcccgcgctcgaggggcgtatcatcgagggtgacttcctcaagatccccatcgaagactacttccctggtgacgctcccttcgccctcatcggcaactacccctacaacatctcctcgcagatcttcttccgtatgctcgactaccgcgagcgcatcccttgctgcgccggtatgctccagcgtgaggtcgcccagcgtctggcgtcccctccaggcaataaggactatggcatcctgagcgtcctcctgcaggcgtggtatgatgtggagtacctcttcaccgtcgatgagcacgtcttcaacccgccccccaaggtcaagagcggcgtcatccgcctcatccgcaatgagcgcaccgacctcggttgctccgaagccctcttcaagcaggtcatcaagacgggcttcaaccagcgtcgtaagaccctgcgcaactcactcaaggcgctcttcggagccgactacccgggctacacagcagagatcttctccaagcgccccgaacagctcggtgtcgaggacttcgtcacactgacgcgcctcctcgaggagcatcaggcgaaggccgctgctaaggcgtagcgccgacgacatcaaatagaagcgggctcagatgatagtcatctgagcccgctttcgtatctctattcaccatgcttgggagccgcattctccatccttatagtgaagggtggcacgaacctatattggtcgatgggcgaaccactactggtcagcgatcggaccagtagtggtcacgatgcgaagcagtactggtcgatattagttaccagtactggtcacttcgtctaccagtactggttcacccaatgacctcccgaaggaggcattctgagttacgtcttctcacgcacggagtagcctgtgagtgaagcaaataaacgaccgctcccccaccccgtgctgctgtggcacgaggcgggggagcggtaggattttttaggagcggtgcggactattccgtcagctcgacgcgctctgcagagggaggaggcgtagtcgccccccagctcttattggggcgagagcccatggtgaagacgagcttaccaccggcagccagatcgctgtggcggatccaggggcgatcaagtggcttgccgttgagcgtagccttctggatgtacttgttctccgaggaagcgccttccgcctcgatgacgaaggtgcgacccgaagccagacgcagcgtcaccttcgagaagaagggcgtaccgatgttgtacacgggtatcccaggggtcacggggtagatacccatcatagagaagaccacgaaggccgtcataccgccaccgtcttcgtcaccgggcatacccatcaggtcgccacggaaccacgtgtcgatgagcttacgcaccagacgctgcgtacgccagggagcgccagcgtagttgtagagataggggatgtggaggctgggctcgttcgacatagcgaactgcccgacattccccgtctggtcggggagcttgctgtagaactcccacttggacatactgagtggtgtacgtagggtctcgtccaggcgctcgatgaagcgctcacgaccgcccatcagatagatgaggtcagcggggttgtgctgtacgtcccagcggtaggtgtaggcattattctcatcgtagtagtcacgtgcaccgaggccaccagagagctcatagttgaagggctcaatgaaacgacccttcttattcttggggtggaagaagcccgtatcgtagttgaagagcttgcggtagtcgtaggagcgacgcagataatcagcactctccacgtcgtggccggagaacttcgccagctgcgacaggcaccagtagtcgtaggcagcagcgaggctgacggcgacactctggcgcttctcccacagcgtcacctcggggacggtctccttctccccgatatccagaccagggaagtagccttccttatccataaactccgagagtacccccttggggcgacgtgtccagggcaggtaagacttctccgccatcgtcttcttcgctgcttggtaagcagcactcaggttgaagcccgagagccccttagcataggcatcagcgaaggtggcgatggtatgcgagccgttcatacggtgtgtgtcgcccgtgacttcggggaaggtaggtagccatccctcggggctctgctcggccatacggaggtagctcgtgagcatctgctgctccttcacggggtcgaggaggatgcgtaaggggtgtgtagcgcggtaggtatcccacagccagtcgtcggtgtagaagggtacgccctcgtcatcgtggaccttcttgtcgaagccactccagtagcgaccgtcctccgagaggcagatcatacgctcataggtgcggtagagtgaggtgtagaagacacgacgctcctcgggagtaccgccctcgatctcgaccttatcgagagccttagaccactcgttgcgcccgtacttagccacgagattgacctcgaaggactggatctcccgctcgacgttgcgcttagcctgctcgacgctgatgtacgacacgccgtagcggagggtcacgccctgcttagcgaaggagaggcagagggtattgccacgtgccacgccatcgaccgtcgcgaggcgacccgtgagtgtatcacgcacgaggcgctccgtgggctctgcgtccagctcggcatagaggtagacacgcgtagaatcctcgagctgctggtagccgaagaggttcttccccgaagcgacgagctccccgtcgggtgtagagaagacaaggtgatggcctgccttagcccgctcgaagttgaactgatagatcgcactgcggtacgagggagcatagcgcacacgtacctcgggctccagcaaggtcacctcatagaggtagggacggacgctctcgctatcgtagctatagcgtgacacctcgggaaggctatcgctgagggcactcagcggactgatagcgaaggccgacacaccacggtgcgacgtcaggatcacggggaggcctgcgatctgctcagaggcatagtccgtacgctgcggatgcacacgcatcatcccattaggcagatgcactgtggggaaggtgggtacaaggagatggctaatattccccatgtaggggtctacatagtcgatcgggtcaaggctctttgagcgaccaagacccgccgaggagcagcctaccagtacgaggctgagcaggaggcccgccaggagcgagcgtgtctgatgaagcatgggcgataaatgaaacttgggaggatagccccctatagacgagatgccttagcacgcacctgcagggcatattctcctcaaagataacgaaaaagccccatctatcagcgggatagatggggcttcttgctatgtggatagcgtgccgatgggcttacttcttcagctcaatgtcgacacgtcgagcgctgctcttgaggtcggtattgcgatcgacaccaccagcgatgctgatgaggcgatcaggagatataccgcaagcgatgaggtagtcgaggacagccttactacggcgctgcgagagacgctcgttcacgagggcattcccttctggggaagcgtagcccgtgaggtagagcttcatatcgggatcgccggcgaggacgcgatagacttcgttgagagcgaggcgtgcttcggggagcagatcgctcttacctacggcgaagaagacctgacgcttgaagtaggagacgacgaccgtgtccgtgcggacctctgtcttcgtctgcacctcgggctgcaggggctgctgaatgaccgtaggagcgggctgctggatcaccgtgggagcaggctgctggatgatcacctgaggctgctgtgcgggctgagcctgctgagcggcacgcagagctacgagctcctgctggagctcgcgcaggagcgagtcgctcgagctattatctacgacgggctgccggatgatcgtctgcttctggctcttagagcgagcgggcaggacgatagcatcgcggtccgagtcacggcgctgcaggaggaggagcatcagctgctcgaggcgatcgagacggctattgctcacctgaggctgtacctggggcgcagcttggggtgcgtaggtatagttcacgctaccagcaggtgcgtagggcatgggctgctggacgggtgctacaccaccgagaccgagggcactgaggagcatctgcagcttcaccagacggaggtcttcggccgtgaggccgtaggtcgtctgcttggtctgctgctggctctccgatgcgatacgagcttcggcgacagcacgcacggcacgcatcagatcttcctcagagagggtgatgagcgtgtcggccgcagtgagaggctgactcacgctctgccctgcgctctgtgccagggcgacagagctaacagagaagagggagagagcaaggaggagggacttcataggacgcatgtctcttagaagttgaagcgatagcctacagccagctggttgttgcggaaggcaccacgagcggtgtagtcaacgaagacatgaccaccgaggacgttgccgagggacgtaccgacgacaaagttggggaggaagcgtgatacaccaccgatgctattgacacccagaccgacaccgaggtaaggcgtgatagccccgtcgaggaaggtaggcaggttgtagaggatgttagcgttcagaccgaagcccgtcttcttaccgaaggctacataagcatcgggagcgaagtcgaactgcgagtcaaggatctgcatgtagccgcgagcacctacgttgacaccggactgatcaccgaagttaggacctacgaagagggcagcgcggttgaacttcagcgtttccttagcaggctctaccttgacttccttagcgtagacttcgtccttctcgttctgaccagcgacgatgacgcggtcacgacggttctgctcattctgcagatactgctcgatgaggcggatgtcatcgctggacttacccgactgctgagcaccagcgacctgctgagcctgcgtcgtgttgatagcgtcgaggcggtcgatgacctggtcgaggcgcttgacgagagcgatgctggggtctaccttagaggcgtcctggctctgcagctgctggggctgtacctgaggctgagcctgtacgggctggccgaggaagttaggagcagcgtaggggctacgatagagagcgttcaagaggaggatcttatcgaggtcagagaggttgctacccgtgacatcagatacagatacctgtgagcccttctcacgcttgaggtcgctgacgacctgattgacgagagcgtcgaactgagccttggtcagcgtgaccgtacggccctgctgagcagactgctgagcagactgcgtagcgacctgagtcgtctggttgtcgacgtgcgtgatgcggtcagctacttcgttcttctcacgcagtacgcgggtcaccgtgacggtgtcgcggcgagagactgcatcagccagctcttcgttgagcttcttgatacgagcatcgtagtcagcacgctgagcattgagcttcttgatacgagcgtcgtagtcagcacgcagagcgttcatttcctcaaggttggattcctgcaggcgagcgacttcagagcgcgtctgagcatcgctgtagctctggtagagctcacgaccgtcgcggttagagcgaccgaagttgaagcggacaccagcctggtagaaggcgttgaccttcacgtcagcagggtcggtgacgctcgtgatagcaggattttcctgttcgctcagcatagcgttgacgctaccatagagagcgacatacttgaagagggggatctcaagaccaccaccaccgaagaggaagaggccgctcttaggcgtagcacccgtgatggtaggcgtgaacttacccgtgacttcgcgataaccagcaccgaggttgaggtaaggcgtcagaccgcgaggcatgttcagacgagcgatgaagttacccccgtacatgcggagctcgttgttcaggttgaagtcgagcgtaccaggagtcttcgtagctgagtagtagaacccacggataccgaagatcgacgagaggtcaaaccctgcagaaccaccgaggaaccactgaggctcaagacccgaagcagagggatagtctacgtaagcgacaccgggctcgaggacgaacttaacgccacggaagccatcggagtacatattacggtacgcgcgagagatcgcatcgccagagttgtagttcgtgccaccgaagtagatgtcaagcgaagcctgacccgtccagttgtggagctgctcaccgccgttagcggcagaagcgaggtagcggttgcttgggttgacgttgaagataaggtccttaccttcgagcgagagggatacgcgacggcccatgttgaacttcagaccgacaccaccagcgccgtagatctgcttttccttgtagctcgtagctgcaccaccgacgggcgtagccgtgtagccgaactccatgataccaccacctgcggtgaggtaaggagtaacgaaggcgttagaccaaaggttgagcttcagctcaccaccgtagcgcttgatgtctacgttagagtcttcgagcttgtcagcccagttgaggagccatgagggcgtcgaggagttgttcttgagcttgcccttgaggtcaaagctgcgctcatagatcccgcggatctcaacgagggggccgaagccgaagccagcgcgcacaccccagaagggtgagtcaccgaggttaagcttgttgtcccagtgggtgtagcctactacgggtgcgaccgtgaagctgacatcctgtacctgagccatagccttgctaccaatgccagcaagcatcgtagcgcaaagaaccaaagaaagtttcttcatatatacattctaattaggagttgtcatgttacttgtcttgacgagggctgaagcagtatgctaaggcttcgtaaatagccctctgggagcaagatggcattagattcagtgggtcgtagactcaatggatcctccctctaaagggaagccacctcacctgtttaaacattacaaagatataaaattattaataccccgagacacaagcagtctattcctatatagacaatggttgttccttgagaaatgtctcagcccctatgtaggaatctctcatcttcttcggggcttcacattttcatcaccccaattgcgacctatatctatacaatatatacagctcttttacgcaacgcaaacgcttccatccacccaagcaccagtacagcgtgcgaggcaggagtcacgcgaagcaatatacgtcccctccaccgttcaaatagatattcgtattcaaagcagtagtggttcaccacccccaataagtagtcaattgtaccaccctactacactggcaccaccacgaaacaagtcgggcaaccgcaggacggaagagaccgacctacgattgcctgattccccgctcataagcgggaggcactatcgccgactaatagcggtagctcagcgagagtgtgaccatacgcccattgccctgcgtatactccgcatcgcgtgctacgagctgagactggatggggtaataggtagtattcagcaggttctcgacaccgagccccaccgtgaaggcaccgagacgataagccccctggagggagagcagcgagatgggcttgaccaccccttcaccctcggcgtattggctctccatcgtagtaggattcgtcttgggagcaaagcgatcacggctacccgtatgcagagcaaagagacgtagcgatagatccttgatgggacgatagctgacgtgagccgtgagcttgagcggaggaatagactgccccgacatatagccattccacgagccatcagcgagacgcttacgcccctccagagcggagaaggtcgcacccagtgagagcttcggactcagcgtagcttctgcactcagctccataccatagatacgctgtggagagcggtcaactacccagaagccattctgactgatgagatcactccccagagctgcataagtatagtagaaggccccctgcaggtctaagcgcgtaccttccccgaagagatcggaaagatgcgaatagaagcctgcctcataattgtgcgtacgcactggatcggtctcgatcttcgagagtgcatccgccttagccgagcgaagggtacgcccgaggtcatagatagagaagccctcagagtaagagacaaagggctggaaggccttgagcccgttgtacgtcgcgcccacattgagcgagaggttgcggtagccgagcgtacctccagcgacctgcacgaggggatccgtcttcttggcacgcaggacggtatagtcagggacgtggacatcgatccagtcgtagcgcgctccagccttgacagtcagcaggtcagacagcaccgccttaccctgcacgaagggagcatagttcaccgaagtcatcttaggcacccagtagcgaccatcgaccagaggctgacttgtctgatctaagaggaagtccgccccatagagcagctgaagattcagctgtgacgaaggggtgagacgtgaaaggagctgagcacgcgcccccccctgcgacgccttggtaaccgcctgaccgctggtctcttcccagcgcggactcttcggattgtgcttgcgatagtcagcgaccgacttgatgctgcgcccgaagagcgagacttcgaggtcagtctgagcgaagacttcgcgagagcttagcttgagatacgcattatggttgtagggcagaccctcaggcatcgcttcagcaggctgggtccctgggacgccgatacgaggcgagaccaagtacttcccgcccgaagccactaaaggaccatcctgctctgtgcggaagaagttgtacatcagctccagctgcgtacggtcgttgaagcggtagcctaacttcgccaaagtgttgatcgtacgcgtatctccgagcccatagcgaggcgagagatagacgccattggcggcaatagccgatcccgtatgctggtagacaccatcgacgaggtaactcaaggagccagcctgcccgtagacttgctgcgagagacgatagcccgccgtcttctctgagctcttgaagaaattgtgatccgtatagctcagctgagactgcccgccgaagggacgtttctctttattctgcttggtgacaatgttgataatccccccgttggcaccattaccgaagatggcggtagcccccttgataacctcgatacgctctaccgcagcagggtcgatggagcggaggtcacgactcgtggctcgcaggggcgtagactgggggataccgtcaataaggacgaggatgctacgcccacgcagggtgttgtagcgctcgttcacattgttgcccgtaggaggcactccagggatgaagtagccaacgatagcctgcatatcaggcaagatctggctcatctcccgaatatctcgctcgggaataatcgtgatacttgcagcggcgcgctgcttgatctccggtatacgtgagcctactacgacgacgtcctggagctcgtgatcgggttgctgtgtcccgtgcacactgggactctgtgccatagccaagaagctgtgacagccgaggccaagcgtaaggagtaacttacgatgaatcattctatttacgatgaatcattctatttatatgataagtaggccccccctactcaatccacgagcagaggagccacttcttgcctcatcaagagggcgatacaaaggtacatcacggctgaggcaaatgagtcctattgatgaaaaatagctatatataggtagtcatcgagacgtgcggcgatccttttctactctatttttatgagtcggcgccctcctctcctgacgtccacaaacgaacctatataggtcagccctccaagctatataggtcaccgcgtcgacctatataggttcacccaccgaccaatagtggtttgaagcacccccttataggagactgtcgccacgagtcttgtactctatttggaatgctaaggcatcgcacgcccagctctccgatatacctctccgaagtgatacacaaacccttcgccttatcgcgagtattcctcttattcagcggaaggaaaagcatctttctcgtgaaggaaaaagcaccttcccgtagtggtattcttctatctatgtacgtagtcttaaagaccaggcacgtaaatccaaatatccacgtacgtagatttatcgtccacgtacgtagcccaaacttatctgccactcgtccacaacttttatccctacgaggagcaacatcctcatataggtcacgtcacaaagctatataggaagcagtccaaagctatatagctctaccccacacatccatatacctatatattggatcgacaggtaaaggggatgcaggaacaattatccccacgtgagcgttatgaaggaacattcgctacgaagccattttatccatacatatatatacgtgtgctcctatgagtaaaatcaagcgccgccttatgacactcctcattgccctcggtatcatcgtcgccgtcctcttcggcgtcggctacctcatcctccacagcccctccttcggggcgctcccctcgggtgcacgactggagcgcatccagcactcgccgaactatcgtgacgggcgcttccaaaatcgctaccccatgccccaagctatgcagaccagctctatgggcgatcgcatcaagatcctctggaagttcctcttcgaccgccccgataatatccgccctgtcgatagcatccccgtggtgcgtcacgacctgaagaagcttgaccgctcggaggacctcatcgtatggttcggccactcgggctatctcctgcagatggacggcgtgcgctacctcatcgatcccgtcttcgtcgagggcgcacccttcggcatctccaacgccttcttcaagggcacgcaggtcttcgacgtcactgacctccccgagatcgactacctcgtcatcagccacgaccactgggatcatctcgactaccacgtagctaaggagctgcagagccgtgtgcgcaaggtctacacgggacttggcgtcggggcgcacctcgagcgctggggctaccgtcccgaccagatcgtagagctggactggggcgaaagcagtccgacggcagagggtgggcgcatacactgcctccccacgcagcacttctcaggccgagggctcacacatgcccagtcactgtgggcttccttcgtcctgcaaggcccgaagcactcggtctacgtcggtggtgatggtggcttcggtccacactatgccgagatcgggaagcagttcccccagctggatctagccatcctcgagaacgggcagtacaacaaggagaactggagcggcatccacatgctccccgagcacctcggcgagacgatgcacgccctcggcgctaagcgcttcctcacggtgcatcatgcgaagttcgctctggcgatgcacccctggaaggagcccctgcagaacgcaaagcgcctgcgcgatgagaagggcttccctatcctgatgcctcgccttggcgacgtcgtccactacaccgacagcaccttcaccaccgacgactggtgggagaagctcgactaatccccacaaaacagaaaggcctcggggcacccctctccaccgaagtggagggaggtgccccgaggctttttcgcgcgaagtagtcgccaggactacgccacgattagaaggtgtacttcacaccgacctgagctctccagcgagagtcgatgtcggagtaatcccaaggcgtgctgcggtggtgcgtgaagctgtagactggactacccgaagcagcgttggagatcgcgatgggggtaatgttgtcgtactggatgtatgggctcataccccagccacgattcagcaggttgccgaggttgatgatatcggcattgagctggagcgtgtgacgacgaccaccgatgttgaggaagaagtcctgagcgaagtggaggtcgaacttgtggacaaactcagacatgaaggcattgcgaggagcgatgcggccacgctgctgagcgaggtcaccgctgctggcgatgaactgctcgaagctgtctgccatctccttgttggcctgagcctggcggagagcacggtcagcaggagattcgccgggcttgttagcgatcgtagcggtgaagtagccgttagcgacttcgtccttcgtggggatgtaagcgaggtcattgcgcagaccggggatcgtacgagcgtcgccgttggcgtcaccgtagtagaggatcgagtagcgaccacccgactggccgttgtagatgataccgatggtcgtagcgaagtgcttagcatactctacgcggtagttgagctgaccgatgatgcggtgacgcatatcgaagttggagtaagacagctcctcgccgttgatatcactcgagtagttgtagccccagttcgaagcagcctgcgagctcgtaccgtcgttgccagccttagcctcaccgaaggtataggcgatcgaagcatcaaggccgtggccgaagtccttcgccagcgtagcggtgaggttgtagctatagccgaggttgttgctcgagaggaggatcagattcgtgtactgctgagcaagcgcagcatcgatcttgtagacaggacggacctgaccatggccatggtcgagcgtaccgttgtcacggaggaggaggttgcggtagcgtacgctattgaggttgcgcgtgtacatcccttcgagcgaagcacggaaaccaccggggagcttagcatcgaaggcgaggttcgagcgccatacctgaggatagcggaagttcgtaccgaccatatcgatctcagtcgtcttaccaggctgcgtgaactgatggttgacatcagcgttgaagcgcagggtggggacgttcgtaccgaggacagccgtacggaggtattccataccgctattggagaagctattggagatccatacgaagggcacacgaccggtgaagatacccgtacccccacggatgacgtagcgactatcagcgtcgacatcgtagcggaagcctacacgtggcgagaagagcggacggataggaggcaggtagttgttcgtgacaccgtattccttagcgacagcagagctattgaagtcggggttagccgtaggacggtcgaggaagaagggcatatcgacacgcagaccgtaagtcaggcggaggtgatcggtagccttccactcatcctgagcgtagaagcccagctgaccagcgcggaagcggggagcccagcgagcgtcgcccgtacgagagacgtcagcagcagagtagccgtaagacttaggagctacctcattagccgtaccgatagcgaggaagtcatcgagcgtggagtactcatagttcccgtagtagttcgtgaggtagaggttacgcatgcggaagagctcgttgtgagtaccgaaggtcagcgtgtggttgccgagtgcgagcgtcaggttatccgtcagagagaagatatcctgatcgagttcgttagcaggcgtatccttgtcgaccccagcgaggacctgatagcgagccttgccagccgtaccattgatgaggacgaaggggaaggcaccaccgaggtaggtgcgcttgtcgcggataccgctgtagctgacacgagcttcgttggagagcttgtcggtgagcttagagttcagctcagcgacgatggtattggtgacgctgtgcttgtggtaaccgttgttgtagaagcgcaggcgcgtaggagagttcgagaagttgtagggcttatcgttgatgtggctgtagcgcagcgtgaggcgatgagcggagttgatgttccagtcaaggcggaccagccccttgaaagtttcgctggggatgtcctgcgtagcgtagctgccaccattgtagccgaggctcgtgagcttgtcagcgatcttcttagcatcttcctcggggacgacagagccgttgccaggggtgaaggtcgagggacggatacccttgacgtactcaccgttggcgaagaagaagagcttgtcgcggaggataggaccaccgagcgtgaagccgacggtgttctcatactgcttgtcgagagccttgcgggtcttgacgtccttaccagcagtcgtgccgaagaagtcctggttgtagtagtagtcgtagaccgagccgtggaaggtgttggtacccgacttcgtgatagcgttcataccgccacccgtgaagcccgactgacggacgtcgaagggagcgatgacgacctgcagagcgtcgatagcttcgagggagatagcattcttacccgaggtaccgagaccgaagacgtcgttattgacagcaccgtcgatctggaagctattgaagcggctgttagccccagcgaaggagccactaccgttagcctgaggcgtgagcttagcgatgtccataatgctacgcgatacggtagggacacgctcgatgttcttacgagagaaggctgatccagcgccagtcttctgagagttgaacttgttacccttagcccccgtgacgacgaccgtggtgagctgcttggtatcgtccttcatctcgatgttgaaggtctccgtctcaccgagagcgaggttgacgttctcgatcttcgcagactgatagccgatataggagatagtgagggtgtagggaccacctgggcgcatacctacgatgctgaagttccccttggcgttagtgatagcgccgtaggtcgtaccggtaggcaggtgcttggcgacaacgctggcgccgataagagtctccttggtagtagggtcggtgatcgtaccgttgatcgccgaggtcgtcacctgggcccatacggctggggtggcgaaggcaaagagagccagtaccaagagacgaagtaaatacttcttcatacgctttgtttgtacaggtggctgtgacggccgtcacagccagaggactaagtgtgagtgatggataaaggtggataagacgacaaagaagcggacgcccaccgcatcaccccacataagtgaggtaatgggtaggcgtccgctatttctttatcggagacatctcttacgaggatgcagcggtcgactattctgcagcagcttcttcctgagcaggagcctcttcggcttcagcgggagcttcagcagcagccttagcttcagcttcggcgagcttcttagcagctacagcagcagccttggccttgttggcagcctgttcggcttccagagcagccttagcagcgttagccttgtccttagccagggtctcacggatagagccaagggcaccatccttcttagacttccatgcttcgaacttagcgtcagcggcctgctggtcgaatgcgcccttagcgacaccaccgaggaggtgcttcttcaggagaacgccttcgtgagagaggatgctacgagccgtgtcggtaggctgtgcaccagtcgtgagccaatacagagcgcgctcgaagtccaaatctactgtggcaggattggtgttggggttgtacgtaccaatcttctcaataaacttgccatctcgtggcgctctactgtcagcgacgacgatcttatagaaggcataagccttgcgaccgtggcgctgtaaacggattttcgttgccatttaaatcggtaaaattgttagaaccttctgcttcgttgcattagatcgggtgcaaagatacggaataaaaccataccacctatcttccgctctaataaagaaataggcacgcccctcatcagatgaggggtgtgcctattatataggtgtacggggccttagttggcaggcgcagctgcgggagcaggagcttccgtggcaggagcgggagctgctgcaggagcaccctgctgaggagcagcaccaccaccgagggcgggcagagccgtaggagcagcacccttagcggcattctgctcgaggacctgctgcgtcttagaatcagcatccgcacccgtgccaaggaagtgcgtcgaggcgatgcagagcacggctacgataccgaagagccaccaagtagccttctccagtacgtcggtagtcttacggacccccatgatgttattcgtcgaagcaaagggtgaagccaggccaccgcccttagacttctgtacgatcaccagcagcaccagtgagatggatgctatcaggatcagtaccgtgagtaggtagaacatgtcttatactaatttgtggttttattattctctatcaggcgctccaggaagcgtatctggtctgcaaagaaacgatttttctctggataattcaaactgagagagcggataatcctcagtgccttatcgtaatgctgctgctgaatatagatcttagagagggtctccgagaggagttcttcagcggcaggctcctctgccgatggggctacagacggggctacgttcggggtgcgtggctcgagaagctcggagagtccctccgcgggaagtggctctgccgtctcgccagcgaagtagtcttgactctcccccaccccctcatagtggagcacttcggggaggtcttcgcctgaggagcgtgcgccatcgaggaagtgatcaatgaggtcgaaggcatcagcttcggcaggcacatcgggtgtcgctgcgacgaaggcggggcgattcccctcgacgaggcggaagagttgctcccgatcgggcaggagcacagagagacgacgcagctctgaggcatagcgcacgtctcccgtcagcgagagattatataggtagaggaaggcgaagggtgcgcagtagggataggactcatagagcgcacggatcggctcgagcgtctcggcggtgaggcgcttgggatcagccaagtagctatagagttcgtcgcgtgtcatctaccagttctctaccgtagcattatagatctgcttcaagaggtcgtccatgatctcacgcagcaggtcgtcctgcacagcgacgaagggctggctacgtgggaagtcgcggtaagccttgaagctacgctcgaagctctccttctcattcacatggttgacatacttcacctgcaccgtcacggtgaagaccgtacgctcggcgaagttatcctgactgacggccataggcgtcagatcgtagcccgtgatcgtgcagtaaagctcgaggtcacccgcctgcgggacgagggagaggcgcgtacggctctcgtagtagtccttgatcttctcggtgaagctggaggcgaggatggggttgacgatgggcgccttattgatgacctcaccgatggtgatggtcttgagctgggtgtagtcgagcgcaccaccattggggctgtagcggatgctgcagcctgcgatgacgaggacgagcgccccgatgagggcgaaggcacggcggtggagcttattcttccagtccatattccttgattttgcggtagagggtacgctcggagatcttgagatcctgggcagcacgacgacgacgtccatcgtggcgaatgagtgcggcctgtatcaagctacgctctgcctcctcgagcgagaggggctgctcctcgaagtctgagacctcggcatgatggcccgtagcgtgcggggtagcagggatctcgatgacatcctccacgggagcatagcccgagggactcgagaggacattgcggtagtcatcacggccagcgagcgtcgtggggtgcgcgctgggggtatgcacctcggcgggggtgtagtcgccgtgagccttgggctgagcgactggcacctcaccacgcataatcccggcgatgagattcttcatctccgccatatccttcttcatatcgaagagcacctgatagaggatctcacgctcgttggcgaaggacgtagcgtcctcaccgagcacggcctgctggcgaagagcagggtgatagtctacgcccagatcccgtggcaggtagcgcgagacagtctctgccgtcacggtgcgctcctcctcgaggacgctgatgcggtcggtgaagttgcgcagctcacggatattccctggccagcgatagccctcgaggagcttagcagcctcgggcgtcaggcgcaggggaggcatatggtagcgctcggcactcatcgaagcgaagaggcggaagagcagggggatatcctgcacacggctacgcaagggtggcacctcgatgggcacggtattgagacggaagaggaggtcttcgcggaagcgaccacgctcgacagcctcctgcaggttcacattcgtcgcagcgacgatgcgcacatcggtcttctgggcttggcttgccccgacggggatgaattcccccgtctcgaggacacgcaggagacgggcctgcgtcgagaggggaagttcccctacttcgtcgaggaagatcgtaccgcccgaggcttcctggaagtaccccttgcggtcggtgatagcgcccgtgaacgagcccttcaggtgaccgaagagctcggagtcgatggtgccctcagggatagccccacagttcacagcgatataagggccgtgcttgcggatactattctgatggatgatcttcgggaagctctccttcccgacaccactctcaccgatgaccagcaccgacatatcggtgggcgccacctgcactgccgtgcggatagcgtggtcgagtagagggcttgtgccgatgataccgaagcggtgcttgatctgctgaatatctacattcatcttccgtctgtcattttgtcgcacaaagatacataagttcgaggactatcaggactcacaaggcgggggtacaacgaggcctccgcatcacactccgatatacctctccgaagtgatacacaagcccttcgccttatcgcaaatatccctcttattcagcggaggaaaaagtaccattcttatgaagaaaaaagcaccttcacgtagtggtattcttctatctatgcacgtagtcttaaagaccaggcacgtaaatccaaatatccacgtacgtagatattagagctacgtacgtagtccaaacttatttgccactcatccataacttttatccctacgcggagcaacaacctaaatataggttgcttcacaaagctatataggtcaacccgcggaccaatataggtttatatctctaccctctacgggtatgtattgctcccttcgcacaagagcacacatacaagcaaagcaaaaaaccacccttcccacgaaaaggcagacagcttcacacgtttacccctcaccacacgccctttctctacattattataataagtgcgagcaaagcgccacacaacccgctgacagcctgctattcaagggcctcactacccccttgctgagaacgaaaaagctgtaactttgccctaaagtttaatacaccttattagtaacgacatcatactatggctacttcaggcaaggactttcgccttgaaagtgacctgatcggcgaacgccagatcagcaatgagcacctctacggtgtgcagaccctccgtgggatagaaaacttcaacatcagcaacttccacctctgcgactaccccctcttcatccacgggctcgcatggaccaaggaagctgccgctatcgctaaccaccgccttggccttctcaccgaccagcagaaggacgctatcgtccaggcttgccacgagctcctcgaaggcaagcaccaccagcacttccccgtcgacatgatccaggggggcgcaggtacgacgacgaacatgaacgccaacgaggtcatctgcaaccgcgcactcgagatcatgggtcacgagaagggtgagttcaagtacctctctcctaacgaccacgtaaacggctcgcagtcgaccaacgacgcgtaccccacggctatccacctcggtctctacgcttcgcacctcaagctccgcccccacttcatccagctcatcgaagctctcgagaagaagtctaaggagttcgcacacgtcgtcaagatgggtcgtacacagctccaggacgctgtgcccatgacgctcggccagaccttcggtggcttcgcttcgatcctccgccacgagatcgctaacctcgactacgctgctcaccagttcctcgctatcaacatgggggctacggctatcggtacgggtatctcttctgagcccgaatacgctggctactgcaccgaagctatggcgaagatcacgggctgggatatcaccctcactgaagacctcgtcggcgctaccagcgacacgagcgaaatggtcggctacagctctgctctgcgccgcatcgctatcaaggtcaacaagatctgtaatgacctgcgcctcctctccagcggtcctcgctgcggtctcggcgaaatcaacctccctgctatgcagccaggctcctcgatcatgcccggtaaggtgaaccccgtcatccccgaagtcatgagccaggtatgctacaaggtcatgggtaacgacctctgcgtcaccatggctggcgacgcttcgcagatggagctcaacgctatggagcccgtcatggcacagtgctgcttcgagtccatcgacctcctgatcaatggcttcgacacgctccgcacgctctgcatcgacggtatcacggccaacgaagacaagtgccgcgacaacgtccgcaatagcatcggtatcgtcaccgccctcaaccccatcatcggctacaagaactctacgaagatcgctaaggaagctctcgagacgggtcgtggtgtctatgacctcatcatcgagcacggtatcctctctcaggaagacctcgatacggtactcgctcctgagaacatgatcaagcccgttcgtctcggcatcaaggccaagaagtaatccacgcctgaccgacacgactgagcacgctcagcactaagcatagtagccccaactcccttacccaatgtaggcaaggagttggggctacttcgtttatctctacgaaaccaagggaagctaccgcctccctccccaacttccctccccgctcacagcaccgacatccctcttatgcgccagctcgctcccacccaatacgccctcttctcgctcgccctgctcctcaccgcagtgcttcctatgaaggctcatcgccgcgtcattcagctcccctccttcggcccacgcaaggggaagcagatcaacgccacgcccgtcttccgcaagctcctcgagggcttacaccccgacctcgagaagggaagcgacacactggagctacgctttcgccctgggcgctaccacttcacccgcgagggagccgtagagcacgagtacttcatctccaatcacgaccacgcagggagccgtccgataggccttctcctccgaggctggcgccacgtcatcgtaaggggcgaggggagcgaactgctcttcgaagaccgcatgcttcccatcgtcctcgacagctgtcagggcgtcgagctccgaggcctcaccatcgacttcaccaatccgcagatctcacagctgcatatcctacactccgacaccgcgcgcggtatcgtcttcacccccgccccttgggtcaagtggcgcatcacggacaagggacagctggaaacctacggcacgagttggcgctctacacccgaccatggtctcgcctttgacccgaagacgcgtgagctcctctaccgcacctccgacatgctcctcccgaataaagacatccgtcagctcgctccgcgcgaggctgccgccatgggtgtcacgggcaagcatacgaggccgcttctctatgctccccactggaaggactcccacctccccgcagggacggtcttcgccgcccgcaccggctaccgcccccagcccgctatcttcatcaccgagagccgggatattcgccttgaggatatgaacatccacttcgccgagggcatgggcgtcctcacccagaactcccgcgacatcacgctggagcgcttccacgtccagctccgcccccgcggtggacgctacttcaccacccaagccgatgccacgcacttcgtcgcctgtgaggggaagatctccgtacagcactgccgctttgagaacatgatggacgacgcgctgaacgtccatggcgtctacctcaaggtcacagcacgtgagggtaagcacacgctcgtcgggcgcttcatgcacgagcaggcctttggctacacgtgggccatgcctggtgactcggtgcgtctggtcacctcgcgcgatatccaggggctagaaggctccttccacgtacgctccattagcccagctgatggcgagcaactcaagggcgcacgcgagctgcgcatcaccttcgacgaggagctacccgcagactacacgcccgagcgacagatcagcatggagaacctcacccgcacgccgagcgtcgacttctcccacaacctcgtgcggcacaaccgcgcccgaggcatcctcatcaatacgccccgccccgtcctcatcgaggacaacaccttcgaccacgtcagcggctcggcgatcctcttcagcacggacaataacatgtggtacgagtcggggcagacgcgtgaggtcacgatccgccgcaacctcttccaagacgtactgacgagcctctaccagttcaccagcgcagtcatcagcatccaccccatcatccccgagctcgcctcacagcgccaccccttctatgggcaggggccgaagagcatccgcatcgaggacaacatcttccgcaccttcgacacgccgctcctgcacgccatcagcaccgacggtatcctgtggcgtggcaataagatcgagccgacgacgagctacccaaagttccaccccaatcagaagcgcttcctcctcgagggctgtcgaaacatagatatcgaggggagcgacctcaccgagtagcccttcataaggaggggcattcacccacacatagacaaaaagcaagagccacgaccagaggatccctggtcgtggctcttgccaataatttgagtttaatgatagttcgctaattcgcttggcgtcggatctacggctacgacgaccccgtgatcatccacaaggtaggtgtgtagtccgtcgaggagtcctgcacttgccatatagcggctacgctccgtgggggcgatgtagcgctggtcctcttgatccacttggtcgagggagatcgtctgtgaccagacagcatcgtcggtatcaagcgagatggcttggtagtcgatagccgtctgtgccttaccagcgaagtaatgatcccataccacattcgctgcgcgactggtagcatcataggctgcccagaagtggatgagacgatagcgctgtgctgactccgtggtggaggcacgaccttccgcgtccagagacttcatttccggtagcacgtcacccacacgcagaccacccgaggagggctgggagggaaggcttgctgaggtcgctcctaagagcaccacgcccgccagtgcgccgaaaagaattcctttcaacgtcataaaatttggtttaggtacaacataccttcagcgactcgctccatagctcgagacaggccccgagatcaggataaagacgaagaaggtccccggctttcgggtctgtaggccaccgtctgaggcaccgcttgtgctccctcgggtgacacgcaaaggtaagaaaaagccaaaatatggagctttcacgcccgcgaagctccacttattttacactccgcacctcccgaaagcccgctgacgatgcaccttctcgcgcagtcagatctccgctcctcgaggagctcctccgacgtcccgacgaagggggatgagtgaacctatattgctccgcgggtcgacctatataggtcacgtcaccgaccaatatagcttcgctcagcgaccaatataggtgcgaggatagagctatatagctttgtgaagtgatctctattaggttgttgctccgcgtagggataaaaagctgcgaacgagtgggagataagtttggactacgtacgtggtcctaatatctatgtacgtggatatttggactgacgtacctggtctttaagactacgtacgtagacagagaaaaaccactatgggaaggcgctttttccttcacgagaaggacactttttcctccgctggataagcggaatacacgcgataaggcgaagggcttgtatatcacttcggagaggcatatcgggaagctaagcgcacgataccttagcactcgaagtagagggtaggactcgcggcgacagtctccatataggttcgccccctccccaccgaaggaggcacccacactgccctaccccagggccgaagatattgcgtacctttgcagcggaaggtacacacggatgcaccttctctacacgaacgaatggtaggaccctatctatagatgacagtcaccttctccatcgagtactgggcgcagccccacgagcggctcacgctcgtaggtcgagctgccgacagccccgcccactctggagcgcagaccctccccctcgagcatctcggggaagggcattggcaagcgactctacacctcccctccgccacctcccctatacattatatatatagctaccgcctcaccgatgagacgggtgccgtactgcgcgaggaatggcggatcccccacgaacttcatctccccgctggcgacacggccgtcttcacacaagaccgctggatcgactgccctgaggacgcccctgccttctctgcggccttctgcgatatccttggtcagcaggcggtagcaccagaggaagcaccacagcctggcctcaccttctccgtccacgctcccgccctacgtcggggtgagcgccttctcgtgacggggagctgcgaggcactcgggagttgggatcctaaaaaggctcttcccctcacctaccgcggacaaggacgctggagcgctacgctccccgcctctgccataggctccacccccacttcgcttcgctacaaatacctcctcagcacagacgctggctatacctacctctgggaggagggcgaagaccgctgggcaagcctccccgacagcaccgtctatccctactgctatgtgcaggatagctacctccatcttcccagccgccccgtacgtacggcaggccttgtcgcaccgctcttctcactgcgcagcgacaccgactggggtataggcgacttcggcgcgctcagagaagccattgacttcgcagccgaagcaggtatgcacgccgtccagctcctccccatcaacgataccaccagcacacgaggcaccgccgactcctatccctacaatgcgatatccgtcgacgccctccaccccatatacatcgatcccgaggcactgcccgccctcccctccgaggagcgtaaggcattcctccgcgaggcaaaggcgctacgccagctccccgccgtggactacccacgcgtactcgagctgaaggagcgcttcctccgccgtgcattcgagctacagggtaaggccgacctcacaagcgaagacttccgtctcttctacgacgaggccgctgcttggctccgtccctacgccctctactgcgtcttgcgtgaccagtttggttcgggcacacccagcgactggacgggatgggaagcgtatgacgaggcgaaggctgccgcctatctcgacgatacggcatatgccgaggaggtaggttattactactggatgcagttcgtcctcgaccgccagctccaggctgtgcgaagctatgctgaggagcgaggtatcttcctcaagggtgacctccccatcggcgtagcaccccacagcgtagacgtctggatggcaccgcatctcttccacaccgagcagtccgcaggcgccccgcccgatgacttcgctgccgacgggcagaactggggcttccccacgtacaactgggagcgtatgcaggaggaaggcaacttccgctggtggcgccagcgcttcgagcgtcaggcccgctacttccacgccttccgcatcgaccatatcctcggcttcttccgcatctgggaggtaccgcgcacgcagcgctctggcctcttggggcacttccaccccgccctcccctatagtctcgaggagtggcaggagaagctcgccctccccttccccatcgagctactcaccgcaccactcgtccacgaagacgagctgacagcacgccttggcgatagcttcgatgacctcctcgacagcggctatctccatagcaccgcccttgcagggctctatcagctcacgtatggcgagcaagccgactacgagacggaggccgcccagcgcgctctcggagccgacgtcgcagccgtactcgctgagctctgcacggagacagccctcatcgccgacccgtacaaggcggggcactaccacccacgcatagcgctggagcgcagtcgtctcttcgcccgcttccccgaggagctgcaggagcgctggcgagccgtcagcgatgactactattacgtccgacacaacgagctcttccgcaccaccgccctgctgcgtctcggtgcgctgacgagccacacgcgccttctgctctgtgccgaggacctcgggatgatccccgcctctgtacccgccgtcctcgacgagctacaggtcctctccctcgagctggagcgtatgccgaaggcctttacccccacgggctgggcacgccccgacagcttccccgcccgctcggtagccacgacctccacccacgatatgccttcgctacgtggctggtggcacagcctctcggcgagcgagcaagagcgctactatcgccaggagctccttctcaccgaggaagttcccgacgaagaaggcctctaccgccgcatcatcgaggcgcatctcgcctccccatccgccgccgtcctcctaccccttgccgactggatgagcctcgacagccgtctctggctcaccactcccgccgaggagcagatcaaccgccccgaggatccgcatcactactggggctatcgcttcccccgcagcctaagcgacctgcaggcggcagcccccgaatggcgcacccacatcaagcatctcatcaccctatcccaacgactataagcctatgatggagcgactctacgtcttagaggaagccgacacgcaggagttcgtcggtgtcaaccgcgcgaacctcgtcacgctacagaacctcttccctaagacgaagctacgcattcaccagaacgtcatcaaggtacttggcgaagaccaagccgccgaagagctcctgcacatcctctcctctctggaagccctgtgcagtcgccacaaccagctgaccgaagcacagatcatcgaggtcgtgcgtcggcaccgcagtaaggccgccgacaccctgcccaccaccgagagcgacgtactcatctacggcgtccacggcaaggcgatcctcccccgcggggagcgtcagcgccgcatggctcgcgagttcgccgagcgtgacctgtgcttcgccacaggtgctgccggctcggggaagaccttcatcgccatctgtctggcggtcaaagccctcaaggcaaagcaggtgcgccgtatcatcctctcccgccctgccgtcgaagcaggcgagaagctcggcttcctccctggcgagatgaaggacaagctcgacccctacctccagccactctatgacgccctcggcgaactcatccccgcccccaagctcaaagacctcatggacacaggcgtcatccagatcgccccgctggccttcatgcgtggtcgcacgctgagtgatgccgtcgtcatcctcgacgaagcgcagaacactacaccacagcagatgaagatgttcctcacgcgcctcggcatgggctcgaagatgatcatcacgggggacttcacgcagatcgaccttcctcgtggcgtgacctcaggcctcaaggacgcgctcgacaagctccacggactgaagagtatcagcttcatccacttcgataagaccgacatcgtgcgccacccgctcgtctccgagatcgtggccgtctacgatgccaaggacgaaaagacgtccgccccctccgacacatcacaaactaatcacacaagatagcactatggcacagacactcgtccgcacggacttccagtttccccatcaggatcacgtctatcatggcaaggtccgcgacgtgtacttcctcggcagtgagcaggtagcgatgatcgccaccgaccgcatctccgccttcgacgtcgtactccccaaaggcatcccctacaagggacaagtcctcaaccagatcgcgacctacttcctcgaagctacgcgcgacatcgtccccaactggctcatctctgctcccgaccctatggtatcgctcggcctgcgctgtgagcccttccgtgtagagatggtcatccgtggctacctcaccggctcagcttggcgtgcctataaggcaggcgaacgcaccctctgcggtatccagctccccgacggcatgcgtgagaacgaagccttcccctcgcccatcatcacccccaccacgaaggaagatgtcggccacgacgagaatatctcccgcgaggaaatcatccgcaccggtctggtcagcgaagaagactacaagcagctcgaggcctacacctacgctctcttcaagcgtggtcaggagatggcacgtgagcgtggcctgatcctcgtcgacacgaagtacgaattcgggaagaaggacggcaagatctacctcatcgacgagatccacacgcccgactcctcccgctacttctatgccgaaggctacgaagagcgcttcgagcgtggcgaagagcagaagcagctctccaaggaattcgtccgccagtggcttatcaagaacggcttccaaggccgtgacggcgaagtcgtccccgagatgaccgaggaatactgcaagagcgtctccgaccgctacatcgagctgtatgagaccgtcacgggtcgtgccttcgtcgccgaacccaccgatgacctcacggctcgcatcgagcgcaacgtcctcgccgccctcaagtaagccccgccttacctcccccacaagcgtcagcgccccatgatcccgagcggatcatggggcgctgctgtatagaaacgtgaggggaaagagcggagggaaaggcacgaaggaatagaggtactcactcgtttttcgcgcggtatttcgtgcgaggtgtaggagtatttctaaatctacgtacgtggattttaggactacgtggggaaatcctttgaactacgtgcggggatcttaggaccacacaccaagatagaagaataggtgtagacctccgtggttttggctgcggtgaagcggaagttttctcgggggagggagaaggtaaaggagtagtgctacggagcaccaaggccgtgaggagcacgcataaaaagaggctgtccgcacgcttccacgagggaagggtgcggacagccttcataggatgaggatgcgagcttcggtgaggaaactcaacggaggacggttagcggccttcggtcaagcgcgcatagaggtcgcgcatacctgctacagcgcccgcctggatatggatgaggtcggggcggtagctactacgcacgggcttcgggtcaatgcagtagacgggcgccttccctgggacgtagcccagcagtcccgctgcaggatagacctccagcgacgtgccgatgacgaggaagagatctgcctcttcagtggcttcgatagcagggatcatctccggcacctcctcgccaaaccagacgatgaagggacggagctgcgtgccatcgggcgctaagtccccgatatggagctcacgtgtcgccccttctgctgggtaggtggtgaagggatcacgcacggagcggttcttcatcagctccccatggaggtggatgacacggctactacccgcacgctcgtgcaggtcgtcgacgttctgcgtgacgatcgtcacacgatagtactcctcgaggcgggagagcagacggtgcccttcattgggctctgctccgacgaactcccgacggcgctgattgtagaagtccagcacgcactggggatcgcggtaccaaccttcgatgctggcgacctcttggacgtcatgccccgcccacagaccatcgctatcgcggaaggtcgacaggccgctctcggcactcatccccgcccccgagaggacgacgaggtgcggacgccgggggctctgggtattcatcggcgtgagacgagcgacagctcctggatgaggcgggggcactcaccgaactggtcgatgagcaggaggacgtagcggatatcacagatgatgctacgctggtaggagggcaggtactggatgtcaccaccgacaccttcccagttgcggtcgaagttgataccgatcaggtcaccgtacttattgaagacagggctaccggagttaccgcccgtggtgtgggtcgtagcggcgaagttgacaggcatctcatacgtgccgtctgccttcttagctgcccaacgcttgccttcgccgtagagctgcttctggtagatctccttgagacgagcggggacagcgaactcccatgaggtggggtcttccttctccatcacaccacgcagggtcgtaggcacctgatactcgacaccgtcgacgggcgagtagccacggacctgaccgtaggtgaagcgcagcgtgctattggcatcgggccagaggttgtccgtgccacgctgagccatgataccgccgacgtaggtacgacgagccagatcaatggggttatcgaaggcacggagatccttcgtcagctgctcgcgcttggtgcggacagaggcagcaaagcgcgacatcaggtcggaggagaggacagcctgctgctccttagcacccagcttcttgaaggcctcaaagccctcgggcgtggtgaaggtcgactgagcgaacatcgcatcgacgtaagcatctaccgagccgaacttatcgataccctcagcgatagccgtgggccagtccttgcggtcgatctgacgcgtgtattcggcgagctcagccttagcgatcttagcatccagcgaggggaggtagtccttgttgttgtaggcggtgaaggccttgtccgtagcggtcagcgggtcatcagcaccaggggcgcgcgtagcttcgatagcctgccacaggccttcgtcgaggtagcagaactggcgacgtaggtcacgacggccctcgatagcacggtcgatcgtggagacagcatcagcgtaaggcttgtagaaattaggagtcttctcctttagtgaacggaagagggattccatctcctgctgcttgatagccttgatgttattcttctcgataccaaagttcgcaccgatagcacgcttgtaagcgttctgcgaacgggcgtacttagcggcgtacatgatgttcaccttggggtcggcaagcatatccttgagcatgacctcctgacggatgctgcgcatgcggatgcggatatcattgtcgatggtcttccactcctctacttcggaggggaggaagaagtggttggtacggccagggaagcccatgatcatagcgaagtcatcacgctgtacgccatcggtagagatgttgaaccagcgcttgggcttcagaggcacgttgctctctgagtagggagcagggttgccgttggcatcagcgtagatgcggaagatggagatgtcaccagcgtgacgggggtacttccagttgtccgtgtcggcaccgaacttcccgatagcgctgggaggtgcaccgacgaagcggatgtcggagtagaccttcttggtgaacatgaggtacttgttcccattgtagaagggacggatctcgacctccgtgcctgggtgatccttgaggaagttgtcaccgacacgcttgcgagctaccgagcgaaggaaggcgggcgagaggtattccatgcccgtacccttacgcaccttcttgagctctgcctgtacgaaggccgtgacgtcctcgatcttgtcgatgaaggtcacgacgacgcccttagcggggagctcttcggcgaagctctgcgcccagaagccgttctcgaggtagttgtgctcgacactgctgagcttctggatcgcgtcatagccgcagtggtggttcgtcaggacgagcccctgcgacgagatgatctcacccgtacagccaccgtcgaagctgacgacagcgtccttgagcgaggtgccgttggggttgtagagatcgtactccttcatcaagagcccgcgcttgacgagctcagggtacttcttggagagctgctccaggagccacataccctcgtcagcacgtgcgatggagccgacgccgagggcgatgaggagcgcaagtagggttttacgcatagtcattgatacgatattgagtggttaagtaatatccgtgtgatgggcgggcggtaggctaagcctcatgccagccgaaggtgaagaggtagtcggggcgcagtgtgtagtgcaccgtgagcgaggtagcctcacgagcgtagccgaggcgtagctgctgcgaggcagggtcgatacgctccagcgtgaagctatggagcgaggcatcgggcgggccgaagatcttgaaggcggtctccttcgctgaccacaggagggtgcggagctgaagctccgagagcgagggagcgctatgctcaagcagatcccattcgctctctgtcaggtagcgcgaggctacggcacggagctgcgggcggtaggtctctatatccaccccgggacggagcgtggaggtcgtgagaagtacagccgcgtggccctcggcatgcgagatactcacgctctgctcgggcgcactggggaggaagggccgccccgtagcgtcatgctcacgctcaggcggtgtagcacagccgaagaggtcacagaggatagcgcccacagcagcctcttcgctactacgacgctcccgtcgccccactacggggaagtgaccaagacaaagggctaccccagagggtaacccttctatgtgctccagcgtcatactgtacccgatgtcgtgtcgtccgctggagggggaatgacttggacctcggtgatgcggaacttctccaagctcgtgactcggaagctccactcgccagccgtgaccagatcacccttgcggggcaggtcttgcttgagctcgaggacgagcccaccgagggtatcgacttgctcctcggccttgccgaaggtaccttgctcgaggtcgagcgcacgcaggacgtccgtcagaggtgtccctccctcgaagagatagctcccgtcgggtaggcgcttgtagggtagctcctcctcgtcatattcgtccgagatctctccgacgatctcctcgaggaggtcctccatagtgacgataccgctcgtaccaccgtactcatcgacgacgacggcgatgtgcttcttcgtactgcgaaactcctcgaggaggtcgtccagaggcttgttctcggggatgaagagcgcatcacggatgagcttcgtccagtcgaagtccgcctcctgctccttgtagggaatgaggtccttgaggtagaggataccgcggatattgtcctccgacccctcgtagatggggatacgtgagtagcccgagtcgagggcgaagtggagcatacgatggaagtcccacgccacatcgatatcgaccatatccacacggggcaccatgatctccgaagcggtcttgttgtggaagttgatgatgtcctcgaagagctccttctcctcgggctcgtgtccctcgagaaggtcaacggcctgcgagaggtcgtccacggagaggtcatagcgcttgggctgcatacgactcgtcagcatgctcgtcgagcgcatgaggaaggaggagaacggatagaggatgcgcgagatcagcgccatcttccccgaggagaagcggctgaaagcgagggggtgtgcttgggcatagaccttcgggataatctcaccgaagagcagcaagaggagcgtcaggatgaccgtctggaagatgaagcccagggcgggagcatgcgtgaagtcgaagatctgcgcaaaggcatagccggtcaagatgacgatagccacgttgaccagattattgccgatgaggatcgtcgccagtaggcgctccgaatccttgagcagctctacgaggccttgatccgcaggatgctcctcctccttgatcgtgtcgatgtcggagggagagagcgagaagaaggcgacttcggaggaggacatgaagcccgagacgacgagtagaaggcccgatatagagagggcgatccaagccgagacggggatcacctcattgattacctgactgaatgattccaaatgcgtagaggattgggggggattagcgcacgccttcgtggcggcgtacggcgttgaggaggtcgcggtgctgctttgccttctgctggacagaggcttcgaggagctgaagctcgctacgcagctcactgcgtacggaggcatcaccctctctccagcgagcacggagctcactaaggcgggcttcttcacgggcgagggattcgcgtagagcttcggcctcagcgaaggtgcgacggccagcgtcactcttgaagtctgcccagcggtggtagatgactgcgccctgcaggtggaaggtcagctccgccttctcctcgcgctgcgtcgtaggctgtacggctatggcctcgccttcgtagaggacacccgagagggtcgcacggcggtaggcttcttcaggcgcaagctccgtcgtctcaccaccctgacgaccagcgaggaaggcagggcgaccagtgaagcgatagacgtggacctgcccctcgggagcgaagcggtcactgatgaggatcccccagccttcgctttcgtgataggcgagcagatagtcgttgtagggggagttgtacggcatgccgaggagggtaggctcgaagaagctattaccctgctcggtgaggcgtgtcatatagaggtcatagccaccgaggcctgcgggagagcggcgagcgaagaagagcgtcataccatcctcgaggaggaagggtgagcggataggcgcatcggcctccagcgtcttggttgctaccccctgacgctcccagctacgtcctgccttagcataccaagcgagcgcatgagcatcggggatgatgctattacgccccagcgcatcgacgaagccgaagatggggaagacgggaggtgccggctgcaggctgtcgcctactacgggcgtctccacggggaggagcgagcggatatcggcggggagctgctcggcgacgaggaagcgcccactgccctgagggaggagctcggctatgcgatcgatcccgacgagtgtgctatcgacgacgcggagctcatcggctgcgccatacatacgctcggcacgtgctatctgcccctgcagcatcgtgatgctgtcgggcaccgcttgacggcggcgctggaggctggagatatacttggagagcgctgtcgaggcagggccaaactgataggcgtgataggcacgctccgcctcacggaggagctgctcggggctctgcgtgggagccttgggcttcacgaccttcgcctcaccccatagtgggacgaggacgagggtggagagaagtaggatcgatcgtaaagacatatcgaatgattagaatacgaactgcgcgcgtagctgcagggtatggtagctcagaccatcaccgctgttggaacgcagacggccgagtgcaacagcatccttgctgaaggaagtgaaagtatagctgaggccgagcatcatcgcggtattgggataccagttcaccgctccaagggcttcataggcctgccccatatagccctgggtatcgatagcgctggcaccgatcatgagctcgacattgcccccaggctccacctcattattgacattagagaagactgcaccgctattggagtagctacgctgcttcccacggagcatataggagcctacgagatatccgccccagaaggagacactctcactaccatcaatattatacgtcttctctccattcgtaataacccctggtctttcctttgtggcaaaggtcgagcacagggcctcaccctggacgaagaagcggtcatcacggtaagcagcctccaggtcaaagatggtgtagtggtcgatccctgagaagccaccagcgatgaacttgcggttctctacgacagagcccgaacgaccgcccaggacgacgatgccgtcatccgacgtcacacgctcgggagtacgagccacagccgagaagccgaagtgcacagtcgtctgatccgtattgatggggcgccagacggcacgtgccgagacaccatagccctcgcccatatggttctcacgagcattgacgcgctcgctgctaccagcgaagaggcctgcaccgagccaatacttatccccccagtgcgaaccagcaagcccccagtgacgggtataggggatgaggaagtcgagaggtagtggggtcgtgaccgagccgtgacgcgtggaggtattcatcccgatgctcagcggctcgagctggtgcccgaggacaagacgcgtctggggattgaaagcgtaggcagcgtagacatcacagaaggtgacgcgctgccccgtgtagttgacgtcgatacgacccgtccagttgccatagcccccgaagaagccgagacgagcctgcgtgatggaggtcccagccgccatacggaagggctcttcttgggtcgcccctgcaggcaggtaggtgaagttagacttatcaacgggagcgaaggctgccacatcgagagtcaagcgaccatcgacaccgagggtcacctcatcaggttgccccagacgcagggcgatacccgtctgggcagctgcctttgtggacgagaggagaaggccaccagcgacgatgaccgaagcgataagcgcgtagttctttcttctattcgacgatgccattagagaatgcgtatttgtttaccttagacaaagatagccttttctgcagtacaacgacggagaggaagcccatacagacagcgtccccacgggggaggaggatagctaagctacccagcctcacccatggggacgctccatttatataggagggatggacttacagatcgactacgaaggatacgacttcgcccgtctcgggatagaagccacgcagctggagggcggagcgacgagagcggctctggctcccagccttgtcgagagcggagacgacctgattgaggtcactctgtgagcgcagaggcacgttgttagccgtcaagaggacgaagccttcgcggaccccagccttacgcagggcactattcgactggagggactggacgacgaggccgtaggagagaccgtaggcacggagctcattggcacccagctccttgagggtagcaccaaggcggttgttcgccccattggaagactgcttgaggagcttagagccaccttcctgattgcgcagcgtgaccttgtaggtcttctctgcgcccttgcggttcaccgtgacctgcacagcatcaccaggacggaagcgagagagctgctcctggagctgagcgaaggaggtgatgcggtggccgtcgatggcggtgatgacgtcacccttctcgataccagcagccagtgcggcgctgatctctgcgaagtcagcgacatagaagccttcgttgaccttcagcccttccttttgtacgagctcgctggtgacatcagcccctgcgaccccgagcataccacgctgtacggtaccgtacttcttgatatcggagacgaccttagcagcgatgttgatgggcactgcgaaggagtagccagcatagttccccgtctgagagtagatcatcgtgttgatcccgacgagttcgcctgcagcattgaccagggcaccaccactgttaccagggttgacggcagcatcggtctggatgaaggcacctacaccgagctggtcgcccgtggcagcggcacgcgacttagcgctgacgataccagccgtgacggtgctggtgaggttgaagggattccctacagccaggacccactcgccgagacggaggttctctgagttaccgaaggggatcgtaggcaggtccttagcctcgaccttgatcagtgcgatatcgctggaggggtcggagccgatgagcttagccttgaaggtacggttgtcattgagcgtcacagagagctcgtcaccaccctcgacgacatggttgttcgtcatgatgtagccatcattgctgatgatcacacccgagccatagcccacgacgggttcgctacgacgtgagcccccacgaggatcgccaccgaagaagaattcgaaggggtcaatcatctgctgggactgcacctgctgggtcttcttcaccttgatgtggacgaccgccttcaccgagctctcggcggcaggtgtgaggtctggagcattacctatctggcgcgagcctatggcataggctgtattctggaatccatattcattcgctgaggtcacaccctcgacacctgactgagcggtatagctacttgagctaccaccattgcgggtcattacgtggaccgtagcagccgaagctgcaatacttaccgctaccaagcctaagacagcggctgatttcttcaataccttgttcatagtcgttaagtataattctttatctgattaaaaaaacactccggagctcctcatcgcgggctcgagacgtgccgtgcttcgtaaggaacggctacgcactcgacctcagatataggtgggtggcggggaagcccctttaccttatgagagtcaaagagggtgccaatgtttaattcacccctacaaaacttcacattctgccaaaagcgcagactttttctcggcaatatgacagcatctcgccgacttaatatgacatatgaagtagtggatgccccgcgacgaagtgtcgtcatcggaagggaaggagtatgaaccgatatgagtacgtgggcagagctatatagctttggactgatccctatacagctttgtgaagtgacctatacttaggtaattgctccgcgtagggataaaagttgtggacgaatggcagaaaagtgtggactacgtacgtggctctaatatctacgtacgtagtctttaggatttgcgtacgtagtctttaagaccacgtgcgtagacagaggaaaatcactacgggaaggcgcttttttcttcgcgagaatgccacctttccctccgctggatgagaggaatacgcgcgataaagcgaagggcttgcgtatcacttcggagaggtgtatcggggagctgggtgcgcgataccttagcactcggaatagaggactggactcgcagcaacagtcgcctatacaggtccacccagcgaccaatataggctcgcatcaccccttcacggaagagcggagcgtcacgctcgtcaggaaggcaagtaagatcaataggaaaagctgaatgccagcgcctcagcggagggcactcgaacaagaagacagggagatggagaacggacagcgatgacacctccgaggggtgcagtagtcggtgtgaagctggaggagggcctgcgactcctgagcggagcgtgcggtgagaccagcttcggcgaagagtcgggtcacgtggttcgtctccgcagggagcttatcgaggcgcagctcttcgcccaccggctcccctacccgctggtagtgggcacgccaagcctctcgatagggtacaaggacgttgatagcgatatgtgcgacggcttcctcggagagcatcccgcttcctcgccacttccctccgcagtagtgcgcagggagggggtggcgcaggagggtcatcagcgcctccatactcggcatctcggggaaggtactcccccagagtggggcatgcacgatgagcgtggcgagctggaggaggcggtactcggggaggccggtggggcgagttcgcgcccgacggaacgcaccttgcggaagaggcgtcaatccatacttatgggcgaggaaggcatattcccgctgccgctcctcgcggagcgcttcgtcggggaggtagtcgaggaggcctgccgagccgaggaggagcgcctcgacctgcgggagctgatcgcggtgcttgaggaggagatgcaggggcagggcgaaggccaggcgctccatcgcatcaccattgagcccgaagcccagcgcacggaggaagagcgcatagagggtctgcgcccagtcgccttcgctccgctcgaggagctgacgcacggccgtgaccttgcgggagaggcgactacgcgagagacaggagagccacatacggcgctcttcttcggggacggatgcgaggtggtctgcgcaggggagcttggcttctgcggagagcaaagcagcagcctcggggcgaagctcttcaggcaccatcaagaggcaggtgggtagcgcctctcctgaggggaagatgacggggcgattgtcctgctcgacgacgtggaggatgacggatcggtaggcggggtcggcatcgtgatgatgctggtgccactcactcgaggcgtggtggatctccaccgcccctacccagaggaggtcatcgatccgcaccttagcggcgaagaagtcggggccagcatgcacattgagcaccccgggatcgaggacctcaatgcgagcacctgccagagcgccctgcgggatcagctccgtatagcggcggtgtgcccatatataatgtaggaaggcttccatggtgtgtcggtattaggcggtaggggaagctccgtcactctaagctatcataggaggggaattcggagaggaaggtatagctcatcgtgtcgtagtcgatacggcagacgagatggtcgaggccgttgctcaggacgaggtacggcacgcgcaggacatagttgtagcggacgatctgctgcagcacggtctctgtcagcgcgacgtggggagccttgtactcgaggatcatctgcgggcggagcgccttgtcgtagaggagggtgtcacatcgcttcgaggtctcaccgaggcgcagtgccacttcattctgcatcaagggctggggatagcctaagacatcgataagataatggacgaagtgctggcgcacccactcctcgggcgtgaggcggacgaacttacgccgcagctcatcatagacatagggcttgccctcacgctgctccagacgcaggcgacacttcggcaggtttagctcgatcatgcttatctttgtagagagtacttcattgggctcatacccacgaaagtacataaatatagtatagatgcccacgtacgacgagatcatccgttcgctcaagcaacgcaaaccccagcgagtttacctgctcgctggagacgaacccctcttcatagaccagatagcctcctttgcggccaaggaactgattcccgccgaggagcaggacttcaatcagagtatcctctatggtgccgaggtcaatgcccgcacgatactcctcgaagccctgcgcttccctatgatgggttcgcaggtcctcgtcttggtgcgcgaagcccagcaggtgcgcgacctcgacaccctcgccgcccacctcgatgagctccccgagagtacgtgcctcatcctctgctacaagaagaaggccgacaagcgcaaggcgctctacaaggccatcagcgagcgaggtggcgtcttcgagtcggcgaagatgtacgactcgaagatccccgacttcatcatcaagagcttcgccgcacgccagcttgatatcgacccacgcacggcccatctgatggccgacagcacggggaatgatctggagaagatcctcaacgaagtcgagaagatcgcccttgccctctccgagaagggcacccgcaccgtcacccccgaggtcatcgaatactacatcggcgtgagcaaggagtacaacaacttcgagctactcacggcactcatccgccgtgacgcagcgcgtgcctaccgcatcgccttgtacttcgcctccgacgagcgcaaccatcccatccagatgacgctctccacgctcttcggcttcttctcgaaccttatggcggtctactacatcgcacagcccaacgagcggagcatcgcctccctcctcggggtacagcccttcgtcgcccgcgactacgatctggcacgtcgaggctactcggccgcacagaccttcgccatcatccaccagatacgcctcatcgacgcttactcgaagggggtagatgccaacatccctacgagccagctctactctgagctcgtgtcacgtatcttggccgcctaagcatgcagcgcaaagagtaccttcaggccttcatcgcccataccaatcgcaacatcttcctcacggggaaggctggcacggggaagacaaccctactacattatatcaaggagcacacctacaagagctgcgtcatcgctgctcccacgggtatcgccgcactcaatgcaggcggtacgaccctccactccctcctacagctccccatcggcgccttcatccccgactcgatggcccagctcccgtcgacgcccaatcagctactggtcacgccacgggacttccgccgacacatccatctgcaggagcgtaagatccgcctccttcgagccctcgagctgctggtcatcgacgaggtgagtatgctccgtgccgacacgctcgacctcatcgacctcctcctgcgtagcgtccgtagaagcccgctacccttcggcggtgtgcaggtgctcttcatcggcgacctgatgcagctcccgcccgtggtcaagccgcaggagtgggacgtactgcgccagtactaccccagcctcttcttcttccacgcacacgtcctgcagaagtaccccccgctctatatcgagctcacacacgtctaccgccagcaggatgccggcttcatcgacctactaaaccacctgcgctacagcgccctcacccccgaggacatacagtggctccgtggacgtatcaaccccgccttcgaccccatcaagagcgagggctacgtgacgctgacgacgcacaatgcccgtgctgacgagatcaatcgcaaggctctcgaggccctccctggggcatatcaagactatcacgccagcatcgcaggggacttccccgaccacctctaccccatcgagcccatgctccgcctgaaggtcggcgcgcgcgtcatgctcatcaagaacgacctccagcagccccgccgcttctacaatggtatgctcgctaccgtcgaggagatgaccgagaagaagctcatcgtacggctggagaatggcgagctcctcgacgtacccgcctacagctgggagaatgcccgctaccgtctcaatgaggatacaggcgataccgagcccgacatccagggcaccttcaagcacttccctatccgcctggcgtgggcgatcacgatacataagagtcaggggctgaccttcgaccgtgcagccatcgacctcgaggccgtcttcgcttcggggcaagcctacgtagcgctctcccgcctgagaagccccgaaggccttgtcctcctctcgcccttaggctccgacacgctctccgtaccgcccgagatcacaggctacgaagccacccgagccagcgacgaggagctacgtcagtgcctcatcgccgacaagctcagctattggctccagcaggctgtccaagccttcagctggagcgacgtcgccgacctctaccgccagcacgcctacagctaccgcatggagagcgagcgtagtcagaagagccgcttcggagactgggcgcatgagcaggccttcaaggtcgatgagctgcgtcaggtagccgaccgcttcgtccagcagctccacggcctctttgcagaaggggaatccgcccttccctccatcgctgagcgcacccgtaaggccttcgcctacttcctcccccgctggacggaggtcttcgtgagcctactacagacccagcgcgacgcccgtggcatgaagaaggtgaaggagttcatcgccgagctcgacctcctctatgccgagaccgtacgcctgatgcgcggcctcatacgcatcgagagctgcatacaggccctcgctacgggagagccgctcaatcgtgatgacctccagatagacgagcgccacggcaagtggctccaagccgcaaaggccgaggtcaagacgccctacatcgtacccgacagcggtgcgccttcccccaagaccaagaagaagaccgccgagcgagagccccgtgtgagtacacaggagcagacgtgccacctcatccgcgaagggaagaccgtactcgaggtagccagcatccgtaagctcagcgtcggcaccatctacggacatatcacgcagcttctcgagaagggcctcctcacggagcaagaagcaggtatcgacagccgtcagatcgatgagctcgcgccactcttcgccaagatgggtgatgaggcggggctgaaggacatccacgaagccctcaaggggcgtctcgactactacgagctacgcctctacctcaccgccttccgactgcatcggacccgccgatagaggtaagtcggagagcattaggacaatacacctttttcattatctttgataggcgctacacctgacactaataaggcgctcagataagatatgaagcagttcagccaattagccatccgcatcttccaggaagctatccaagcctacgagctacgaggcagcgtggacacaccctgcacaggcaatccctaccccgagcacacgatcgagcatgacctcttccgcaagaactggatcgacaacgcccagtggtgcctcgaggacatcatccgtgaccccgagatcgaccccgtcgaagcgctgaagatcaagcgccgtatcgaccgcagcaaccaagagcgcaccgaccttgtggagctcatcgacagcttcttctacacccactttgcagatgtgaagcccctccccgatgccaagatcaacaccgagagccccgcttgggctatcgaccgtctctccatcctcgcgctgaagatctacaatatgaacaaggccgtccagcaggctggctccgatgaagcactccgtgagaagtgcgcctccaagctccgcaccctacgcgagcaagaggtcgacctcacgacagctatcaacgagctcctcgaggacatcgccgctggtcgtaagtacatgaaggtctacaagcagatgaagatgtacaacgaccccgagctcaaccccatgctcaagggtcagaccttgtagtctcaccactcctacccgctatctgtggcccgctacctcatcatccgcctctctgctatgggcgacgtggcgatgctcatccccctgctctacgccgtagcacgtgccaacgagcagcatgagttcatcctgctcacccagccgttcttcacggagctcctcctcgatgcccccgacaatgtcgaggggatggctatcgacatccgtcgtggcgaggagcgtagcttcctcggactgctacgctatgctcggcgcctcaggcatgagcacttcgatgcggtactggacctacacgacgtactgcgcaccaaggtactccgctcgatcctccgactgacgggcgtacccacgcagcacctcatcaagccccgtgaggggcgacgccgcctcgtcgccgacagcgcgacgaaggatctcacgccgctaccgccgatgtggagcctctatcagcaggtcttccgctcggcggggctgagcgtccccgaggccattcctccagtggccatccaccccagcctccgtgcgaccttcgagcggctccaccccgagctgactcagtctgtgccaggacgcctgcgtctcggcatagctcccttcgcctcgacacgggcgaagacctacgaccccgctctgatgcaggaggcgctccgcctcatcgaggagagcgagcgcttcgagatcttcctcttcggtagccgagggaaggagcaagcacagatagagcagtgggctacgaaccgccctcatatccactccgtcgctgggcggcttgacctctcggacgagctcatcctcatcgcttcgatggacgctatgatctcgatggacagcgcgaatatgcacctggcgtctatggtcggcacgcgtgtcttctccgtctggtgctgcacacatcccgcagctggattcctcggtataggccagcgcctggaggattgtctacagcccgaggatgctcctcgccgtccatgtagtatctttggggacaataagcactgccacacggggcccgacttcgcttgctcaagggcacttcgccccgagcgcatcctcgaggcagtcctcactctcagcgaaggcgcagcttcatagcgccaccttttttccgccctttctccacgaatgaaactacgtatcaataagctgatcagcgacgctggcctgggctctcgacgtgatgtcgaggagtatatccgcctcggtcgcgtcaagatcaacgggcgtcgcgcccagctctccgaccttgtctcggagaccgatgtcgtcttcttcgacgaagtagacctccctgtcaaggagcttatccaagagcatgccgccgaggagaagctccagaccaagctcaagaaggatagcgagcgccctcgtacccgcgaccgccgcagcgagcgcgccgagagccagcgtatcctctccgctccgaagagcgctgccctgcgcaagacgagcaagaacaacccagagaacaagcgcacccataaggctcgcaccgaaggctggggcgacgaagaagaagtcttcgacgaacgactcctccgccaccacaatagtggccgtcgcggcagtgcacgcaatacccgccccgcacgctctgagcatcgtgggcatagtggcaagcgccgctccttcgacgaagagtagtccgcacggcgtgcgggcttcacctcttcacgctcttatccccacatctttatgcacgtatatattgtacgccacacgtctgtcgtcctcgacggcaatgagacgtgctacggcgatatggacatcgacgtacgccccaccttcgaggaggaggccagggtcacacgcgccgcactcgaaggtcttagcttcgacggcgtcttctcctcgcccctacagcgcgcccgcaagctcgcggacttctgtggctacggcttcgccacccttgacgaccgcctgaaggagatgaacttcggtgattgggagggtcagccttgggccgagatcatcaaggacgagcctgtggatcagttcttcgcccgctacatcgagggcgtacctcctggcggtgagtcgctgatgatgcagtatgctcgcgtacgtgacttcttcctcgagaagcgtcgtgagggctataagcagatcctcgtcttctgccacggcggcgtcatcaactgcgcccgtgcgatcaccggtgaggtgcgcctcgtcgatgccttcgcgaccctccccggcttcggctccgtcacgcgcctcgacttcacccatctcgaggactaatcgacatcacgaaggacgcggagcgaacaattatgccctgtatcttgtagttatataaatagggatcccatgggtacgcatacccgatgggacttccccatacagacaagacgcaagacccgctatttactattatcacttctacataaacaagacaatgaaattctcagaaagaatgcaggctgctatcaatgagcagatcaacttcgagatgttctccgcgaacacctacctctctatgtccgcctacttcgctcagcagggcctcgacggcttcgctcactggtactatatgcagtacaaggaggagctgactcacgctgaagacatgatgcgctacgtcctcacgcgcggtggcaaggtcgagatcaaggctgtcgctgcagtagagacggagttcaactctcccctggagatcgccggaaaggcttaccagcacgaatgcctcgtctccgagaagattgaaaacctcgtgcgcatcgcttctgaagagaaggatatgccttcgcaggacttcttctggaagtacatccgcgagcaggtcgaagaagaagctaacgctacaaacctcatcgaccgcgtccgcatggctgagggtgccgctatcctcttcctcgacaaggagctcgcagcacgccagtaatcccttcgtctccccccaaacgacgagccgccaagtcacccgctcagggtacttggcggctcgtctgctttatacagcgaccgctcagaggtgtaaaaagctccccaatatgcctctccgaagaggtacgcaagcccttcgctttatcgcgcgtattcctcttatccagcggagcgaaaagtgtccttcctgcgaagaaaaaagcgccttcacgtagtggttttcctctgtctacgcacgtagtcttaaagaccaggcacgaaaaccctaaagtctacgtacgtagatattagatccacgtacgtagtccaaacttatctaccactcgtccacaacttttatccctacgcggagcaacaacctaaatattggtcacttcacaaagctgtatagggatcagtccaaagctatatagctttacccacgtacccatatacctatatatgggatccttgcggaagacctacccgacccgcagtactaaggctatttcgcctatatttgcagccatgaaaaagacattactctctcttatcctcctcgcttgcctcggggtcagccagcgagccgctgcgcagaacgaagaccgcgtacactccgccaccgtcgtcgagctcggcctacatagccgcttagcctaccaccaagccctaccactgggactggtggcgagcgcacacgtcggctacgagctccacaccaaccccgtcggcttcctcgacaaggagaatagtgctcccctcgagtacaccttcccgatgctcctccccacggcgggcattgagcttcgctggtacacagggcgggagaagagccaagaagaaatcaatagcgggctctatgtcgtggcaggtggtgacgtgcagacgcgcaccgcaggcgtcgtcttcaaccgcctctaccgcggtccgtggcgctatcgctacggagcaaaggcaggcctcggccttgtgtccgtcctcggcgatgtcatctacgccaagatcgagatcggcggacgctatagcagccccttcctcgggagccaaggcagcgagtacttcgccccctacggcgacatcgggatcggcatcaagctgtagacggctggggaaggacttgatatgaaagctctatctttgatcgtttcgcttatatagagtagcacgatcattatgaaagcaaataagatcctccttggcttagcactaagcctctccgccctgactgcttgcagtagtggacagagtgagcagtccgcacaggatagcaccactcagccctctgccagcgtcgtcgcgaaccccgacagcctcccctaccacatcgcgaagaactacttcgctgccgaagactcgctccctgcgacgctcacaagcgaagaggagctgaatcgccacctcggtatggctacgactatggcggacaagcccaccgagatcgactggcagcgtgagttcgtcatccccgtcgtcctccccgctacgacgatctccacggagatcctccccgtacgcctgaagaaggactctgagggcaacctcgtcctcacctacaaggtgcagcgtggcgaagacatgaagaccgctgagatacgccccttcaccgcgatcatcgtatcgcgtgacttcctcgcacctgtacgcctcgaggaagctaactaacctccttattccctacgaaatagggcatgcgcagccccgcttccgagccttcgggagcggggctgcgtgcatctatacagccggctctcggtggggcagtcgcagagtgtatgaaaaaagacagtgacagtgggggataagtacgtgactttttcgtacatttgcgctgacttttgcgggggtagtgcatcgcttgatgtccactttgctgggtcacaagtcatgtgctatgcaccagcagaagcactcgtgtgtaattcatagtaagtttaacaaatggaaaatttgaaagagatcaagcccatcgcggacttcaactgggatgagtttgagaagggagaggtagcgtgctctgcttctcgtcaggagcaggaagccgcttatgatggcaccctgaacaacgttaaggatcaggagatcgtcatcggtacggttaccaagattggtaagcgcgaagtactcgtcaacatcggcttcaagagcgaaggtgcgatcaactcagctgagttccgctacaaccctgacctccaggtaggcgacaaggtcgaggtcttcatcgaatcacaggaagacaagaagggacagctcgtcctctcacaccgtcaggcacgcgtcgctcgctcatgggatcgtatcaacgaagccctcgagaaggacgaagtggtacgtggctacgtcaagtgccgcacgaagggtggtatgatcgtcgatatcttcggtatcgaggccttcctccccggctcacagatcgacgtccgtcctatccgcgactacgatgcttatgtcgacaagaccatggagttcaagatcgtcaagatcaaccaggacttcaagaacgtcgtcgtatcgcataaggttctcatcgaagctgaactcgaagctcagaaggctgagatcatcagcaagctcgagaagggtcaggtcctcgaaggggtcgtcaagaacatcacttcttacggtgccttcatcgacctcggtggtatcgatggtctcgtccacatcaccgacctctcttggggccgtgtatctcaccccagcgaagttgttagcctcgaccagaagctcaacgtcgttatcctcgagttcgacgaagctaagaagcgcatcgctcttggtatcaagcagctccagccacatccctgggatagcctcgacgctaacctcaaggtgggcgacaagatcaagggtaaggtcgttgtcctcgctgactacggtgcattcatcgaagttgctcctggcgtagaaggtctcgtccacatctctgaaatgtcttggacgcagcacgtccgctcggctcaggaactcctgaaggtcggcgacgaagtcgaagctgtcatcctctctctcgaccgcgaagagcgtaagatgagcctcggtcttaagcagctcaaggaagatccatgggaaaacatcgacaagcgcttccccatcggctctcgccacacggctaaggtccgcaacttcaccaacttcggtgtcttcgtagagatcgaagaaggtatcgatggtcttgtacacatctccgacctctcttggacgaagaagatcaagcaccccaacgagttcacggaagtcggtgctcctctggagatcgtcgtcctcgaaatcgacaaggaaaaccgtcgtctctctctcggccacaagcagcttgaagagaacccctggaacgccttcgaagctgactaccgcgtaggtacgatccacgaaggtacgatccgcgaattcgtagagaagggcgctgtcatctcgctccccgaaggtatcgaagcattcgctacgcctaagcacctggtcaaggccgatggtacgcaggctgtcaagggcgaaacgctccccttcaaggttatcgaattcaacaaggattctcgccgcatcatcgtctctcacagccgtaccttcgaagacgaagctaaggctgaagctcgtgcaagcgagcgtgcagagcgcgctgagcgtcaggctcgccaccaggatgcttctgctgccgtcgctgctaccaatgctgctacggagaaggctaccctcggtgacctcgatgcactggctgccctcaaggaaaagctctcctaagagacgcttcgcatagcctacccgtgaggtaggtgcaaaacaacggacgccccgtcttccactgtggaaggcggggcgtcttctttatatcgttgggcgcttaggcctatcgcttctgaggcgcagtgcgcttgcgggagatatgggcagtgccacactcggcatccttgtcatagctcaggcgagcaaagacgggatagtggtcggagggagcgcgacgcacgtgcttcttcaggcgcacctcggcgggagcttggctactcccctcttcggtagcgtcctcacgctccgtccagtagctatcggtacgcacggcatagcgcaagacacggtagtcaggagagacgaagatatggtcgatacggctcggcgtcttcaactcggtgtcgaaggcattgaacgtcccgttgggtgccagcttacgctcggcgatagcatacgagtcacgcaggagggctgttgaggtcagtaggccatagacctcatcggtctggtcgacattgaagtctcccgtgaggatgtgagaggcacccgtgggcacgagactgcggatacgactcatcacgaggcgagcggactccatacgcgcccgacgcccgacgtggtcgaggtggaggttaaagaagtacagacgctgatggctgcgcaggtcttcaaattcgccccacgtacagatacggatgcaggcagcatcccagccgagggcggggcggtcgggtgtctcgctgagccagaagttacccgagcggatcttcttcaagcggcccttgtggtagaagatggcggagtactcaccttcctcacgcccatcatcacgggcgacaccgatgtagtcatattcggggagccctttcagaaggtcgtggatctgcccgaccttcgcctcctgcgtgccgaagatatcagggctttcgtaggagaggatttcgcagatgacggggcagcgctggctccagccattgccctgcttggcgtcggattcattctggtagcggacgttgtacgtcccgacgagaagctcttgggcctgcacgccgaggacggcgacgaggctaagagcgagggtgaatagtcgcttcatgctgattgattcatgtattcagtgtgtatctatacaaatatacgccattcaccagactgccctgcaacatacagcccccttcctaagatgcatcatccccttcaaaaaagtagccacattgaacattcttccagaaaaatagtagcccaatgagggattctcactgggctactactctaataactatgagctagctattattcctctctgatagggaacagtatgggatcagctgctttcttcttcttttttacgtcgttgtataactcctgatctgccttcatgacatcacgtgtattatcgacataaatccgaggagcaccagagactgtaagctcaatttctcccaaactaagtttgcactttggcgtattgtctaccgggaattttaaggtttcatcatatagattccaggccaaatgacagtgacaactccaccctgatgattttagaggaaccctactataaatataagcattgttcccctgctgcttctccttcccattgatggtctttttaaacggctcattaagctctcgaatcatcttttcagcagtatgatgaacgatgattccgtaatattttagctcctgatctccgagtcggtaagcatcaactagaggtaaaccaaagaaaatactttcgtctgcatcatagaggaactctccatgggctagacagcccttaacagcaaaaccattcttgaatgattcctgcataagaactactccagcttttgatattcgatttagatcctcaggagtatcactctctgtaacaaccagaattgaatctgagaagaaagccagttttaggtgtcctcccttaagcagattctctgatcgattatccaaggatctccgaaagcactccaacttctctcgtgcctccgcaaaaggtgtttcttggacgaatgcactaaatcccatgatatcaacgagcaggacaaagcgcttttgcttatcacttgcccattttcttttcttgtctcgcacaggttgttctgtagtcttttccattgatattactctgttaattagactgttattgatctgattatatctttctaaggcgaaagagtgtatgtgtttcagtaccaaagatagtatatctatgcaaatatacgcgtatacgccattcaccagactgctctgtgccccactccttgcgcacatcactgctcctcctctgattctggaggcgtgacgacctatattggtcactgagtcgacctatatagatccacgtcgcgaccactataggttcgcatgcggaccaatagtggttcacccgcagaccaatataggttcatattccgatccaatagtggttcatactatgaacccatagtacttccactgcaaaccaatagtggtcgaaatagggggctatataagtgcacgctccaccccaagtaagtcactgaaatatagcgggctaatcgaagtacctttaccccgccctgcctcacaccaccagcgaggtacgagcaggcgtaactctccgagcgaggaagtcgtacctcccgcccttcctcaccccaccccacaggagcgcgcgggatgggctaaagtctggagaaccacgagaatagtcgtacctttgcgcccaagaatagataactgatgtcgacaacacctcatccctcccccctcatcccatcggcagcacgtgccggcctgaccttcgggctcatcctcgtcgtgatgtataccgcccgtatactgagcttacaggtacccctcctgcagattctctacttcttcggggtcatcatcgtgcccatcgtggcctatcgaggtgcccgagcttatcgagattacttctaccccacggggcccttcaaggctggtcaaggcttcagctacgtcgtcctcctacacgtcttcggcggtatcttggccttcatcccccagtacttctacttccgctatgcgatgcctgcgctcctggcggcttgggaagaagccctgcgcacgatgccaggggcgaccgctcagatgcgtgagatgatcctgcagatgcagggtatcaccctctggcagtggctctggacggactattgcctgacgatcatcctgggcggaatctggggcctcatcacggggctcatcctacgtcgcaaataagatagatacatggacatctctgtcgtaatacccctatataacgaagccgaatccctgcccgagctcgaggcatggatccgacgcgtgatggaggagcatggcttctcctacgagatcatcttcatcaacgatggtagcacggacgactcctggcgcatcatccaggagcttcgcgagaagaacccccatgtgcgtggcgtgaagttccgccgcaactatgggaagtcccccggtctgcagtgcggcttcgcccgcacccgtggcgacgtggtcatcacgatggacgctgacctgcaggacagccccgacgagatccctggcctctaccgcatggtcaaggaggagggctacgatctggtcagcggctggaagcagaagcgctacgaccccgtcctcagcaagaacctcccctccaagctcttcaacgctacggcgcgtaagctctcgggcatcgacaacctgcacgacttcaactgcgggctcaaggcctatcgctccgaggtcgtcaagagtatcgagatctacaacgacatgcaccgctacatcccctacatggcgaaggtggcgggcttctcacgcatcggtgaaaaggtcgtacagcatcaggcacgtaagtacggcacgagtaagttcggcctcaaccgctttgtcaatggctacctcgacctcatcacgctgtggttcacctcgaccttcggccgcaagcccatgcacttcttcgggctcggtgggagcctgatgttcatcatcggcttcctcgcgctggccgtcgtcctgtgcagtaagctcttccatatctggacgggtacgcctgcaccgctcgtcacggaccgcccctacttcttcatcgcactcacggcgatggtcatcgggacgcagctcttcctctcgggctttgtcgcagagctgctggcgcgtcagtcgcaggaccgcaacgactacaagatcgacgaagaaatctaactccacatacacacacgctatgcaccacctacgccacgtagtgctggctgctgcccttctcctcggcttcggctcgtgccagaagtctgggagcggtagcgaaggcgactacaccaagctcacgggggaggttttcacgacgaccttctccatccagtacaatgcccagaaggactattcggaggccgtcgactcgaccttccatgccttcagccactcgctcaaccccttcgactccacgagcctcatctcagcgatcaaccgcaatgagtcgcagcttatggactcgatgctgcgcgaggtcttcctacagtccgtcgtcatctcgcgccacacaggtgggagctatgacgtgacctgcgccccactcatcaacctctggggcttcggcttcgagaagaaaaagaccgacagcgtcacccccgaagccatcgacagcgtccgcgccttcgtgggcttcgacaaggtccacctcgacggcatgcgcatgatcaaggaggacccccgtatgaagatggacttctcctccatctccaagggctactgctccgacctcgtggcacgcatgctcaagcaccgtggtgtgacgagctacctcgtcgagctcggtggggagattgccttcgagggcaccaactcacgaggtgagagctgggtcatcggcgtcgacaagcccatcgcagatcctgcgggcgtgatcaatgacttccaggtgcgcgtacagctcccccgtaccgctggcgggctggcgacctcgggcaactaccgcaacttcaaggtcgtgaatggcaagaagatcgcccacaccatcgacccacacacgggctatcccatccagacggatgtgctgagtgcgacgatcatcgcccccacatgtatgctcgctgatgggctggcgaccgcctgcatgacccgcacggcagccgacgtccccgcactgatacagaacttccctggggtcgaatacatgctcatcctcggcgacgagaagacgggcttccgcacggtgatgtcccccggcttcgagcgcctcatcctccccgactaattcactactcactaataatacgattcaatatgaagaagatcattgccctttacgggccttatgacacaggaaagacgactacgctacgcacgctctcacgaattttcttggagctgatagaagagaaagacgatttccaagtagtcttccactatgataaggatacgaaaatagctatatcaaccggaggggatgataagggtatattcgaggaagatacacacctctacgacgggacagactggaagcctcatacttttgctactccaaaaagaatatcggatattctagactttattaatccagaggatgacaaaaagaagatctcgactttgcacgagctctcgcctcagctccagaatccgtatacagtcgctacggcgctacgcaaactctctcgagagtttttaaagctgatagaagagaaagaaaatgaaacaggtgatattcaaatagccttctgttacagaggcaagaaaatagttatatcgaccgcaggggataataagaagactgtcacggagagcacaaacttattcaaaacgttggaggcagatattcttgttaccgcaactagaactaaaggaggctctgtagatgccttagaggccttcgaggaggatgatattggcacgaaagctatttggatctataagagttatcttacttatagtgagttgaaccgtgggaaaaagggtaagcctctgaaagagtctatcacaaaggaacagattgaaatcattagaaatacgatcaatgagcaacaggctaagatccttaaagctaccatcgatttgataattgataaatgggaagaacagtccgaggataattcctcctcatctgaccctgtcacagagtaagggataagcagaagctcgcccgtggattccttgagtggagtccacgggcgagctctttattttccttcggttggtgcttggcgaagggaggggacggaaagggcgaaggagaggggcttccttagcccgcatagaatgggttccccccgcctgccaagagattggtatcatatttgcacgaaggtaaatagctcccgcacggcatagcacgagcaggaggataatgatagcgcctataccgcccctctatgtggtgtaagccactaatatatagcaaataacaataaataatatgagcgaagaaatcaaagatcaagagctggagcgcgacgagcagacagccgcagaagagcagacagattgtcagacaaacgagcaggctcagcctcaagaggaagaattgaccgagagcccagccgaagaactttcgcccgaagccaagcttcaggccgagctcgacaagctcaaggacgcgcacctgcgtctggtcgccgagtatgacaactaccgcaagcgcaccctcaaggagaagagcgagctcatccgcagcggtggcgagaaggccctcaccgacctcttgcccgtcgtcgatgacctcgaaatcgccctgcagaacctcgacaaggccaccgacctcgatgccctcaaggaaggcgtgcacctgatctactcaaagttcgtggactacctcagccgtcagggcgtcacagctatccccaccgagggcgagaacttcgacgatgagctccacgaagccatcgccaccttccccgcccccgaggagagcctcaagggtaagatcatcgactgcgtcaagaagggctacaagctccacgacaaggtactacgccactcctctgtggtcgtaggtcagtaaggaaaggagaaactatctatggcagaaaagagagattactatgaagtccttggcgtagctaagggcgcttcggccgaagagctgaagaaggcctaccgcaagctcgccatcaaatatcaccccgacaagaatcccggggacaaggaggccgaagagaagttcaaggagcttgctgaggcctatgacgtactgagcgatccagagaagcgccagcgctacgaccagttcggtcatgccggcgtcggtagcagcgccgccagcggtggcggtggcttcggcggaggcatgtcgatggaagatatcttcagccgcttcggcgacctcttcggaggtggtggcttcggaggctttgacttcggaggcttcggcggaggtggcggcggtggccgtcaggtcctgcgcggctccgaccttcgcgctcgcgtccgcctcaccctcgaggagatcgacaagggcgtagagaagaagctcaaggtgaagaagcaagtcgcctgctcccactgtcacggagacggtaccacggagaaggacggcaagaagcagtgcgacacgtgtcacggctctggcgtcgtcatctccgctcagcgcagtatcttcggcatgatgcagacgcagtccgtctgccccacctgtgaaggtacgggtgaggtcatcactaagccctgtagcttctgtaaggggaagggcacgcagatcggcgaagaggtcgtatccttccgcatccctgctggggtggccgcgggcatgcagttctccgtccaaggtaaggggaacgcagctccccgcggtggtatacccggtgacctgcaggtcgtcatccaggaagaagaggatcccaatctcatccgcaacggcaatgacctcatctacaacctcctcatctccgtacctacagccgcccaaggtggatccgtcgaggtacctacgatcggtgggaaggcacgtgtgaacatcgctgcaggcacgcagccaggcaaggtcctccgtctgcgaggcaaggggctcccttcggtcaacggctacggcaagggtgacctgctggtgaatgtcaatgtctttatcccgaagctcaacgagaaggccgatgcctccgtccttgagacgatgtccgcacccgccttcgagcctacggacgaagcccgcaaggagatcgataagcactaccgtcagatgcttcgatagtcccgaccacaaaagggaactctataaataggcgaggccgcgatcatcagatgatcgcggcctcgctttcgctttgtgtgtatgttcgtggagaggtctgtgccctacttagagacccttgggattggggccgtaggcgttgtcaccgggctcgccttcctgaacgaagagatagatcaggtagaaggcaccgaaggggataagagcaataaggaggtacttccagtccttacccaggtcatggagacgacgtacagagattgcaaggcctgggaggaggagggcaaggcttacaataagggagaggacgctgtgcagaccgatgaggccatcaatgaggccagctacgaagccaatgacgaaggcgcagagtgtatagctccagtattcacggcggcgtgcacggccactgaaatccatgtatttaagagttacaccttccttgaaatactcgaagatagctttttcttgcatgagtcttttagttgtttgtgggttgatatatcgtaattataacgtaggtaaagatacggatattatctacggtaacaaaaagatgactccacagcactctatacaaggcgtgcccgcaccgacctcatggggtcaggtgcgggcacgccttgtatagagatgcgagcctcagggcttacttagcctgctcgagagcaagcgtacgtgagggctggtcgcagagctcgggatcaccgtagaactggattgggccaggatagatgaagcacgtatccttagcccactcagcgcggttagctgcgaagtaagcgaagggcttgccctgaaggtctacgagagccttctggatcacaggcttcatttcgccgtgacgacgctccatgttcatcatcatcgtcgtggggataccaccagcgatccactcagtagcgggagccgtgaggttctgtacagagctcatgtagcccgtcacacctgaggcgatgaggcaagcagccgtacgaccgagggcgtagcagtagtcagcatcgaagttcgagggcatagcgcagcggccttcgtagccgaagaagtgggtgaggggagagaacttacccgtgaagcgaccttcttccttccaagcagcgagcttggtagcgaccatctcagccaggagcttttccgtctcgatgagcgacacctggacgttgccgtgggggtcacggtcgagcgtcagctggcgagctaccgtagcgggcaggctggcgtagagagctgagttagcagcgctgaggtgctcagcgacataggcacgctgctcgtcagcggggacagcgcggaactctgcctcgtggtgtgcgaggtagtcgttgagctcagcgatgagcgccttgaaggcagggatgaattcgataagaccttcggggatcagtaccgtaccgaagttctcacccttagcagcacgagcggctacgacctcagcgatgtaggtgactacgtcgtcgagggtctggttcttagcctctacttcttcgctgatgatagcgacgttgggctgtacctgcagggcgcactcgagggcgatgtgcgaagcagagcggcccatgagcttgatgaagtgccagtacttgcgagcagagttacagtcacgctggatgttaccgatgacttcagcgtagaccttcgtagcggtgtcgaagccgaaggaggtctcgatctgctcgttcttcaggtcaccgtcgatggtcttggggcagccaatgacctggacgggagcgccgatgctcttgtagtattctgcgaggactgcagcgttggtgttggagtcgtcaccaccgatgatgaccagcgcacggatgtcgagcttcttgaggatctcgaggcccttgtcgaactgagccgtctcctcgagcttcgtacggccagagccgatgatgtcgaagccgccggtattgcggtactcgtcgatgatgtcggccgtcagctcgatatagttgtgctgtacgagaccgtcaggacccatgaggaagccatagagacggctatcgggatggatcttcttcagaccgtcgaagaggcctgcgatgacgttgtgcccaccaggagcctgaccgccagagaggatgacaccgccattgatgggcgtgccagaggtagcctcgctcgaagcttcgaaagtgagcttggggagaccgtatgtgttagggaaaagcttggcgatagcttcctgatcgctgacgctctgcgtagctgcaccgaagacggtcttcacgccaccttccagtgccttagggagcttggggctgtacttgctacgagcctgctggagtgcactcttaatcattattgcttgtttgggtataatagaacctatggatttgcggtacaaagatcttaaaatttcttcataatagcctccacttttcctttttgcccgtagataaaggccttttagatgctcgcgcgcccgcccgcgaaggcgatttacctgccacccacctctctttttcaccccactcaccccaccttctccatccctcccaagcgcctctattacagcgtctctcgaggtcaccagagcacagacctcaaagcccccaaaatttgaccagtactggtcgccgttctgaccagtactggttgctttcgtgaccagtactacttactatgagtgaccagtactgctcgccgctctgaccagtactggttgctttcgcgacctatattggtctgcgggctgacctatataggttcattcagcgacctatatagcttcacacgacgacctatataggtccacccaccgaccaatatagcttcacaccacccctcccctatagatacagaagctactgcacgagaaatgagagggggtaggtatgcggggcatggcgtatctttgcgctaataaatgactcagccaatggcagacaaccgctccacccgcccctatcagctggggatcgccctcagtggcggcagcatcaagggctttgcccacctcggtgtcttgaagtacctcgacgaggtaggcctacgccccgagatcatcgctggcaccagtgctggctccatcatgggcgccttctacgcgtcgggctatgcgcctgaggaggtccaccagctcctctcgcagacgggcttcatgcagatgaccagcttcaccaccaaggggggcgggatcttcagcacgacgaaattcctccagttgcttaagaagaacctccgccaccgcaatctggaggatctaccgacccccatgcgtatcgtagccaccgacctaaaccgaggagaaccacacgtctttactgagggacccttggcgaagattatcctagcttcatcaagcatccccatcctcttctgccctgtagaaatcgacggtcacacctacgtcgacggcgggctcttccgcaacttccccgtcacggccatccgcgaggactgcgaggaggtcatcggtatgaacctcggccccgtgcagagcgcagaaatccccatgaatataaaggacatcgctaaccgtgcatgggaactaatcttccgccagaataccacccctgactgtgcggcctgcgactacctccttgagacgagcgaggtcacaaagttcgggatgttcgaggtcagcgcttccgagcagctgatgaagataggctacgagctggccaagtccgagctcgcaccactggtcaaaaagaagaaggacgcaaagaagccttagccccgccacctacccatacctatgcagcagaagatcgtcatctactccgccctcactcgactctgggggaataagaatgcgacccgccagccccatggcacactctccgagaacggctcggggaagctccgtgacttcacgccagaagccctcgcctatatccgcagcctcggggctacccacgtctggtatatcggcctgctggagcacgccacgaagaccgactacagcgcccaaggcatccgtcccgaccaccccgacacggtgaaggggcaggcaggctcgccctatgccgtcaaggactactacgacgtcgaccccgacctcgccgaagatccctacacgcgacaggcagagctggatgccctcatcaagcgtacccatcaggctgggctacaggtcttgatggactttatccccaaccacgtcgcccgcacctatcactccgatgcgtgccctgagggcgtcgcagacctcggtgctacggacgatgtacagctggcgttctccccgcgcaacaacttctactacctccccgacacctcacttatcctacccttatccacagagtcatccccatacaccgagtgccccgcacgcgctacgggcaacgactgcttcagcccctaccccagcatcacggactggtacgagacggtgaagctcaactacggggtggactactgcgggggaagtggcctgcatgccgaccccatacccgatacgtgggtgaagatgcgtgacatcctctgctactgggcagcacgtggtgtcgatggcttccgctgcgatatgaccgagcttgtcccacccgccttctgggcttgggcgatcccctcggtgcgtgagcagtaccccaagacgctcttcctcgcagagatctaccagccccaccgctacgacgagtacctgcatgcaggcttcgactacctctatgacaaggtcggtgtctatgacttcctcatcgctctcggcaagggcgcacgggacgcagcagacttcaccggtgtgcgtgatgccgtcggtggcgagcaatcagcgatgtgctacttcacggagaaccatgacgagcagcgcctcgcctcggactttgtcttcgcctcaccccgtcagggcttcctcgctacggctgtcgcagccctaagtggtggcaatcccctactcctctacttcggtcaggagctgggtgagcagggcatggacagcgagggcttcagcgggcgtgatggccgcacgacgatcttcgactactggagcctcgacaagctccagcgcctgcaggctggtggctacacccccgcccagctgacggacgaagaggccagcctactcggcgactaccagcgcctcgcttcctgctacaccgaccccatcatcagccaagggagctactacggcctgcgtgccgagggctctggcagagagcgtgtcctcgccttcgcccgcgcttcggaggaagggctctacctcgtgctggcgaacttctccagtgagcaggctgacgtcgccctccccctacccgccgaattcttcgccgctacgggcatcaccgagggcacagccttccgtgccacagacctgctcacgggtgcagtggacttcctctgcctcaccacgctggctccccttcgcctgagcctcgctccccacggcctgcagatcctccgcctcacagcggtataaagcaaagcgcccccacacatatcagcataaaaagacccgccggctaccctccttcgtggagcgtagccggcgggcttattatggggagtagcttcccttagtgcagggtagccgagcggacgatctcgcagaccgtggggtgtgggaagacgatgcgagacagctcagagagcttcatacgctgctcgacagccataatcgcaggcaccaggatctccgaagagccattaccgaagaggtgcgcaccgaggatgaccccctccttgtccgtgaggagcttgcagaagccattgccctgctcgttctcgatgatgaagcgaccagagagcgtcatcggcacacgatgcacctcatagtcgatgccagccgtacgcagctcctgctccgtctgaccgacagcagcgatctcgggatcggtatagacgataccagggatagcgcggtagctcatcacatcctccgtgccggtgatgtggtgtacagcgacctgcccttcgcgagcagccgtgtgagcgagcatagacgtgccattgacatcaccgacggcatagataccaggtactgaggtctggaggtgctcatcgacgacgacagccccacgctggagctcgacaccgaccgtctccagtcccaaaccatcggtcacagcacgacggccgacgctgaccagcagcttgtcgaaggggatctccagcgtctcgccctcatgctcagcgatgaccttgccctcacgcactgcagtgaccttcgtggagaggtggaacttcaccttgcgcttctcgaaggccttctgcagctccccagagagctcttcgtccataggtccgaggatcttaggcagcatctcgacgaccgtgacctccacgccgagcgtagagaagaaggagacgaactccataccgatgaccccgccaccgaggacgacgaggctctgtgggagttcctcgacctcaagtgcctccttagctgtccagaagggcacatcgctcagcccatcgatgggtgggatgaaggcacgtgagcccgtagcgatgatgacgtggcgtgccgtataggtcgcctcgcctgcagcgatggtgaagccctcatcaccgcgccccgtgagacgagcctcttcggtgacgatctccacctcgtgaccctgcagaccgatacggatacccgcaccgagcttcttgaggatcttcgtcttgcgtgccatcaccttaccaaggtcgaaggctgcttcagggatcgtaagaccatatttcttgccatcgagggcttcggagaggaggtgagctgagtgcaggagcgccttcgtaggtacgcaaccttcgttgagacagacaccaccgagcttattcttctcgaagatgacgacgcggaggccgtgggctgctgcatgctctgcagcatcggtaccgccggggccagcaccgatgatagctacatcgtagttcatgaatttgagtgtagtgagtgagttatataggtattattagctaagatcctcgatgtgtccatcgatgaagtctatcttttctgcttgggggacgcggggcagaccgggcatacgcaccagagcgccgaggacgaggacgatcatctcagcacccgtgttgatgacgacgtcgcgcacctcgaggtcgaagtcacgcacgctaccataggccgtgggatcgtcgctgaaggagtactgcgtcttggcgatacagacggggaacttcgaccagccgtggcgctcgatacgctcgagctggcgctgtgcctttgccgagaagtggatggagcgtgcaccgtagatgcgctgagcgatagccgtagccttctcctcgatagaggcggtgaggggataggtgaactgcaggggctgcgagggcttctgctcgatggtctcgacgacgaggcgagcgagctcttccgcaccagcaccaccttcgccgaaggccgtgttgacagcgaagcccacaccagcggcgtggcaatgctcacgcaccagtgcgatctcctcctccgtatcggtagcgaagcggttgaaggctacgacgaccgtctgcccgaagctcttgaggttctcgatatggcggtcgaggttagccagcccatggcggacgccctcgatattctgcgtcttgagatccttctcatcgacaccaccgtgcatcttcagcccgccgagggtagccacgaggacggtgagcgcaggctggaggcctgccgtgcggcacttgatgttgtagaacttctctgcgccgagatccgcaccgaagccagcctccgtgatcgtgtagtcggagtgcgccagcgccatgcgggtggcgaggatcgagttgcagccgtgggcgatgttcgcaaacgggccgccgtggatgaaggcaggggtatgctcggtcgtctgcgccagattgggcttgatagcgtcgaggaggaggacggtgatcgcacccgctaccccgaggtcacgcacggtaaagggctccccctgcttcgtatagccgaggaggatattctcgatacggcgacgcaggtcttcgagtgaagtcgacagacagaggatcgccatgatctccgaggcaggcgtgatgtcgaagcccgattcggctgggataccattgacctgaccaccgaggcccgtgacgatggagcgcagagaacggtcgttgacgtcgaggacacgcttccagaggacttcgctgagacccttgtccgtattgcggttctggtagatgtagttgtccaggagcgcagtgatcatattgtgcgcagaggtgatggcgtggaagtcaccggtgaagtgcaggttgatcttctccataggaaggacctgagcgtagccaccaccagcagcaccgcccttcataccgaagcaagggcctagagagggctcacgcagtgcgacgaccgccttatgaccgaggcggttcataccgagagcgaggccgatagagaccgtcgtcttgccgataccagccttcgtagcggtgatggcggtgacgaggatgagcttgccaggcttatgaccagcttggagctcggagagatctaccttggcgaggtacttgccgtagtgctccaggtggtcggtggggatagccaccttggcagctatcttttcgatcggctcgagggctatcgagcgggcgatttcaatgtcagtcttcattaccagaaagagagttagtgggtcaatgatgtgggtaaaagagcttcctattcgggagagagatggggtgaaagcaagccgtgcgaaaggactgtagaggggactaacagttctttcgcacggacatatagaggttacttgaggaacttatcaagccagccgaagaaggtacgctgccagagcagggcgttctgcgggcggaggatccagtggttctcatcggggtagatgaggagctcggcagggatgccgcggagcttagccgcattgaaggccgccataccttggcctgcgaggatgcggtagtcgcgctcgccgtggatgaccagtatcggtgtatcccagttagctacgagcttgtggggggagttagcgaaggtacgctgagcgactgcattgtccttctcccagggagcaccgcccatatcccagttggcgaaccacatctcctcggtagtcatgtactgcatctcgaggttgaagataccagcgtgggcgatgaaggccttgaagcgcttctggtgcacgcctgccagatagaagacggagtagccaccgtagctggccccgacgcaaccgaggcgctcgctatcgacccaaggctccttcttcagctcatcaactgcggtgaggtagtcttggatattctgccccgagtagtcaccactgatctgctcgttccatgccttaccgaagctggggacaccgtggcgattgggagcgatgacgatatagccttgctcagccatgaggcgcatattccagcggtaggagaagaactgactgacggggctctgtgggccaccctgacagaagagcagtgcagggtacttcttcgtcttgtcgaagttcggtgggaggacgacccagacaagcatgttgcccccgtcggtcgtcttgacccagcgcttctctaccgagataggagcgaggccgtcgagcgtagacttattctctgctgtgagctgcttcgctgcacccgtcttaacgtctacgaggtagagatccgtgggctcgatgtagctctgacgaccagcgaggatcttaccaccctgtacatccagagaggtgtagtcgtgcatacccgtggtgatctggcggatcttacgactcttgagcgcgatctcccagagctgggcttcggcatgcttcgtcgagaggaagaagaggctctggctattagctgcccactggagctcatcgacatcgtactcgaagccgtcggtgaggaaggtcttctgccctgtcttcagatcctggacgaagaggcgcttgaggtcggcttcatagccgtcacgctccatgctgatccagctgatacgcttaccatcgggcgagaagcgggggtgcgtgtcatagccacccatcccctcggtgatattgcgagtctgccccgagacgaggtcgtagagatagatatcggtattggtggagagggagtactccatgcccgtcttcttgcgggaggagtaggctaaggtcttaccatcggggctccatgagagttcctctgccccgccaaagggcttcgtaggagcttcgtaaggctcaccctcgaggatatccttaccgcccgtgatcgcttcgcctcctacgggagcgatgaagatatgggggatcgtctctacccattcgtcccaatgcttgtacatcagatcggtgacgatacgacccgtagccttaggtaggtcggggtaaatctccttagtactcttcccgaaggaaatctccttgatataggccagctgcttctcatcgggcgagaagaggtagtccgagagcccaccctcgatattggtcacctgacgacggtccgtaccatcggctgccatcgtccagacctgaggagcgccactctcagaggagatgtagctgatacgacggccctgctggatccagcgagcgccatgcacgccagcgacaccctgggtgatctggcgacgtgcgctgccatcggaggagatggtgaagagctcggtgcggatcttattatccttgatgctggggaagcccacgctgtagacgaccgtcttgccgtcgggagagagggcggaggcaccgacacgagcgagcgaaagcatcgtctcgggcgtcatgtgctgcgactgctgagccacagcaggcagggtagctgagagggctgctgccgtagcaagagcggtgatgtgcttcttgatcttcatagcgatatgcgtattgtatatgtatgtggtctgggattaggagaagcgtaggccaagggcttccttgagcttgcgcacctcggggttgatctccgcgagctgattgaagcgatcctcttgggtgaggatgatcttcgcctgctcctctacagtcttctcgcgcaggacgaggttgaacttccgattctgcagcgtcgtgcggaggaactccacgagctggggatagacctccatcaccgtggtatggatagcctcacctggtgggagggagatctctgcctgcacgccgtctaagagcttcggtagctcggggcgcaggatgttgcggtagaggatctgtgagggcgtcagctcctgctcgacgaagcgtacccaagctcgctggaggtcatcctccgtgaagtccttatcctcgacaggggcaggggcctctgctggagccgtagaagaggcttcgctgggagcgtctgcacgacggcgtgctccgaagaggcgcttaggagcggaggaggggggagctggagggggaggtgtagcagatgtcgcaggtgcaggtgcgggcgcgggtgtcggttcagctgccgcgggaggaggcgtcaccgccgaaggggctggcttgggagctacctgtggcgcgggagttgctacgggagctgtctgcgctttgggcgcaggagaagctgggggtgtagtcgcagggggcgtctgaggagctgcctgtggtgtagccgtctgaggtgcagcgggggctggcgcagcagggagattgaggtcagagtcccgcttgaagagagggaccatactgagaaagctcagctcgactaagaggcgcttattcgttgccccgcgatactgctgatcggcctgcaccagagtcttgagcgcagcgaagaggctggcaggtgtgcactgctgggcaatggtcgcataggaggcggctacggcatcgggcttctccaagagctggagcgtctcgggatgctgggctaccaggaggtcacgcacgaaagcggagagccccgtgaggatcgtctgtccctcgaaacccttacccatcagctcatccaggaggagcaagacactacgatggtccccactcaggaagagctcgaagatgcggatgaagtaggtatagtcaaggacattcagactctccagcgcatgctggtaggtgatatgtccaccggcgaagctggcgatacggtcaaacatcgacagcgcatcgcgcatccccccatcggccttctcagcgatgagcccgagcgccgtctcctcggcatcgataccctcgctatcggcgacgtagcgcagatggcgggtgatatcctgcacggtgattcgcttgaagtcatagatctgacagcgcgagaggatggtggggaggatcttgtgcttctccgtcgtcgctaagatgaagatagcgtacgaggggggctcttcaagggtcttgaggaaggcattgaaggccgccgccgagagcatgtgcacctcgtcgatgatatagaccttgtagcgaccaagcgcgggaggcatctgcacctgctcggtgagctggcggatatcctctacggagttgttcgacgcagcatccagctcgaagatattgaaggagcgctgctcctcgaaggccttacagctctcgcactgcccgcaagcctccccttcggccgagaggttctcgcagttgatcgtccgcgctaagacgcgtgccgccgtcgtcttccctaccccacgggggccacagaagaggtacgcatgggagagtttgcccgagcgaacagcggtgcgtagtgtggaggccatagcctcctgcccgacgatactacggaaggtatcggggcggtatttgcgtgcggagacgacgtagtgctctgtcattcttcgaggtctgtgctggatctattactggtaggacaaagatacgtattccgctccagcctatggagtgctatctataataaagtagcgccccccacccgacggatctcagtccgagggatgggggggcgcctattatgtggggaggtgacgaagctcccttagcttacttcgtgaggccgcggaagcgcagaaggctcgacatatcgggctccgtgaggccggtgaagttcgtgaagaacgtgccgacaggagcggtattcccacgtgagaggaccatctcacggaagcgctgaccattctcacgcgtcagcccgccgtgtgcggcgaaccactcaaagatattgtggtcgaggacctccgtccagaggtaagagtagtagcctgaagcatagcctccagcgaagacgtgcaggtagtaggccgagcggtagcggggaggtacgagggcgaagtcaagaccagcacgagcgagcacctcacgctcgaaggcatctacatcgctcaccgtctgaccagcggggagcataccccaagccatatcgatcgtcacagcagcgaggttctctgccagtgcgtaggactgtccgtaggtagcagcagccttcatcttatcgatgagtgcctgaggcataggctcacccgtcttgtagtggcgggcgtagtggcgcaggacgacagagtccgtcatccagtgctcgttgaactgcgagggcatttccacgaagtcacggggcgtattcgtacccgagagcgtctcgtacttctgcgaagcgaagagaccatgcagagcgtggccgaactcatggaagagcgtctctacatccgacgaggtgaggaaggcgggagcgcccttagcaggagcctcgaagttgcagacgttgtagatgacaggcttcgtaccgaagagcgtactctgctggacgaagttcgacatccacgccccacccgtcttcgttgggcgacggaagtagtccgtatagaagagggccatgggggtattatcctggtcgaagacctcgtagacctgtacgccatcagcatagacagggatatcaggacggggcttgaaggtcagaccatagagctggttggctgcgtagaagaccccattcttcagcacgctatccagcacgagatagggcttgaggtctgcttcgttgaggtcgtacttagccttcttcaggcgctcggcatagtagtcgaggtcccaagcagcgagcttgaagtccttcccctccgtctgctgagcgaaggcttcgagttcggcgacatcgtcagcgaccttggcacgaagggcgggagccagctgactgatgaggcgctctacggcctcgggacgaccagccatctggtcgctcagcgcccaagaggcgaagttgggcagcccgaggagctttgccttctcggcgcgcagggctgcgatgcgggtgatcgtggggtgcgtattcgtgctatcaccgctcgagcagcgcgagagcgaagcctcgaggacgcgacgacggacatcacgattgttgaggtcggcaaggtagcctgggcgtgacgtattcgtctgctccagcagatacttacccttgtggcctgcagcggcagcggcctcggcagcacgggtgatcgcttcttcggggaggccatcgagctcctcgaccttgtcgacgaggacagcagcttccttcgtgccagcgttcacctgattcgtgaacttcgtctgcagcacagcgatctcgctattgatcttcttcagagcttccttgtcggcagctgagaggagagcgccctcatggacgaactgatcatagaggacctccgtgaggcgcaggtcttcgccctggaggctggagcgctggtcgtagacggccttgatacgagcgaagagcttctcattcaggagcagcgcatcgtggtgggcggagagcataggcgtcgtctcttcgtcgatcttctgcagctcctcggtgccgtcagcacctacgaggcctgagaggatagaggtagcgcgtgcgaggaggcgaccggacttctcatacgccagcacggtattctcgaaggtcggagcagccgtattgctcgtgatgctgtcgatctcggcgagctggatacggatcccctcctcgatagcggggacgaagtgtgctgggcggatcttactgaagtcgggagcttggtagtcaagcgtgctctcggtgaggagggggttctccttggtcgagctggtctggcaagcagtgagcatagcgaggaggctcagagtggcaatgagtcgtttcataggtgtgtgggggaattagaggtgggaggtcgctgggggagctacaccagaggctggggctcgccaatccaggcgatggcctcatcgatcgtgtggatctgaggggcgtagaggaggcgtctgagatcttcgatagtagtcttgacgcagtagtcccctgcgaggcccgcaacgtcgatgcggcgcgcgttcatgaggaggtcgggcactgcatcgtggaaggcactgtaagagtccttgtggcgagtcatcgccttggggatgaagaggacattttgcccctgacgcttgcgctccatgatcgcatcagacagaggaggatagagagcagcccccgtagtatagcggacgcagtggataggccatgggccaccagagacatcgaaactacagtggtcggcaggatgctggtccataggacgacgatagcgtcgtactcggcatggtgctccttgacgtaagcggtgaggtaatccatcgctgggatcgcgccttcgatggcgagggagccggtgatgaagtcgttctggggatctacgatcagcaggatgttcatgattagaggtagtggtgtggtttttgggggtaaagagtgaggggataaggggtggcgcgcggggaaggcgcctgagtgccccaaggctgggcctctaagagagggtactcaggcggctccgctacgccgcatctcaagtcttatcagagctcgagatcgaggtcgaactgctcatgccaaggcaggccctgcttcatgagcttctccatgaagggatctggatcgaactcctcgacgttgtacacgcctgggcgacgccagaggcccttgaagaacatcatcgcaccgatcatggcgggtacacccgtggtgtagctcacgccctgagcgccggtctcctgataggcagcctggtggctgcagttgttccatacgtagtaggtcttctccttgccgtccttgataccgcggatacggcagccgatggacgtctcacccgtgtagttctcaccgagctcaccggggttaggcaggatcgccttgaggaactggatggggacgatctcgacgccgttgtagaggacggggtcgatacgcgtgataccgatattctgcatgacgcgcaggtgggtcaggtactcctgtccgaaggtcatccagaagcgtgcacggcggatcgtgggaaagttcttcacgagcgactccagctcctcgtggtagaggaggtaagactcacgcaccccgatgttgggataggtcaggggcttgtggatctcctgaggctcggtctcgcgccactgtccatcctcgtagtacttacccttctgggtgatctcgcggatgttgatctcgggattgaagttcgtggcgaaggccttgtggtggtccccaccgttgcagtctacgatatcgaggtagtggatctcgtcgaagtggtgcttggcagcataggcggtgaagaccccggtcacccctgggtcgaagccacagcccaggatagccgtcagcccagcttcttcgaagcgctgcttgtaggcccactgccagctgtactcaaacttagcttcgtcgagcggctcatagttcgccgtgtcgaggtaattgacgcctgcctcgaggcaagcatccatgatatggaggtcctgatagggcagagcgacattgatgaccagctctggcttgaaggacttcatcagagcgacgagctcggggacgttatcagcgtcgacggctgccgtctggatcttgacattggtaatctcggaggcaatcttatcgcacttactcttcgtgcggctggcgagcataatctcagtgaatacgtcgctattctgtgccaccttcttggccactaccgtaccgacaccgccggcaccgataatgaggactcttcccatacgctattcttagtcttcttaggctaaaggataaataatacgatttccgtctataccacttaaggtacagatctacacaaaggtacaaaaagtagagggaagcccttcgctcccctcaagagagcgccttgcatccgctctcctgagactgcttctgagagtcctgcccgctatttattctgctaaggcatcgcgcgcccagccccccgacagacctctccgaagtgatacacaagcccttcgccttatcgcgagtattcctcttattcagcggaaggaaaagcatcattctcgtgaagggaaaagcgccttcacgtagtggttttcctctgtctttgtacgtagtcttaaagaccaggcacgtaaacccaaatatccacgtacgtagatattagagccacgtacgtagcccacacttttctaccgcttgtccgcaacttttatccctgcacggagcaacaacccaatataggtcacttcacgaagctatataggaatccaagtaaagctatataggaatccaagtaaagctatataggaatccaagtaaagctatataggaatcagtccaaagctatatagctttcttcgccatcctatatagctctacccacccatatacctatatatagggccctcgcgacaggcgcatccactccgtaattataggggctcgcggagtaaggatcgggaagtcggtctgcaaacgaatagccgttcgcaccacgaaccactactgatccgagtgcgaacgactattgcttttagtcaccgccctaaagcaagctggctccccctcctgcaagaggagagggagccagctgatgatatattagcctacgtaagattaattagcgataggcttcttagagaagaggcggatataagccttcagcttaccctgctcagtagcattgaacgtccaaccgttcgccttcgtcgcagtaccgacacccatgggaccacggttactctggatattttccccatagtagtagagccactgaggttcggcttccgtactacggatccagtagaagagcgagttctgcgagcctgtaacccccttgttattttggcggtgcccattatactcatacccaccgagggtcagctcacgctgtgcgtcatcggcttcaggctcatagtccatgtatttatcagagcctcccttccaaagaatccaaggcatatcccaaccatagtgggtagcgaagcttcccgtataagggcgatggaatgctggaccaagataacgagagtagacatgcaactttgacgcccttgtatcgaactgataggcattggccgtcaagaactgctgcccttcaccccagccaacgatcatatatccagtcattggatgcctcgtgtttccgagtcggacataggacgtcgagaagtaaaggccctcattagctccatccgtcttgtactgcagaggcttctttgtatcccctacgatgtagggaatctgcatctcggcagggattctgatcgcagcgatgttatgagcctgacccgagaggctttcgtggaggccactgtatgcttttctctcataacgctcctgaccagataagactatgggatagttagccaaggtctctgttgcaccccgaagatagccatacatgtttgtattgaaggccttcggcacagaggcattatcatcataggagtggaggtagtgcgtgtaggtgaagttcttaccatccgaagaggtgtccttaaagggattgtcaggcagcttcccagggaaaatcgacgcccagtaattgatatcgggtagcgcatcaccttcagccaccgtcatattctgcatctctgcataggaacggtagcccccctcatctgccgtcttcaggtagtggaggaaggtgtagatcttcgtctgagcacctacgagacggatactctgaccgccacgactcgtagatgagaggcggaaggcacctgcggggaagttacgcgtcaagagaggcttacggataagtgccttgggcagcatcgtaccattacttccaacgcgattgtactcaacacccgtgcgattagcatcgtagaggaggacgtgcatcacaccaccacggctctgctcggtagcagcgtccgtctgaggcatagcccagatgaggtagtacttagaggacttagcgcccgtagcgatatcttccttctccttgagtcagaagtcggtatagttagggaagggcagcgaccagccataggtggcagccgtcgagtcgatgacatccgtcccgtcagcacgaaggcccgtccaatgagcagcgagatcctttgaagagtggatattctcatccgagaggttgtagctaccacggaaggtcatcatattcgtgaggatacgcatccctgcgagcttgatcgaggagaagttctcattcttaatctcaagtctcaggagcgtcccctgagggcgcagggagaagcgacggctcccgaaggaaagcgtaggaatgctgccattgcccttatcgacatagttaccatcctcaagcgtcatccactcagagaagtaaggtacgtcaagcttagcgcgctcagcgtccgtatagctgctccccttagtcgccttagtgatccccttgaggttccacttaccattagcgctaaagaggtcgatcccttggtccgactgagcatcagagctatacttcacagactcgaggttattggggtctacagacagcgtgcgaccattcagcgtaccgccgacgatcagcgacatactccaagtacccttcgtgaagttagagccacttgcagccgtgatggatgcaccagacttcttcgtatggaggtagaggcgatcgcttggcacagcagagccatcggggtaagtcgtgcgacgctccatcgtaaccgtggtgatcgtgacaggctgagagcgaaccgttgagcggaggatgacagtcgccgtgacgtcgcccgtcaccgtggaaggatcaaggtggggagcggtcttcgtcgtgccaccatccgtctcatcatagacgacatagtcaaaggcacggcctgcctgcgcctgcgcttcggcaggagacgtaggcgtctcgcgcagctgatctgcgccaaagtcgagcaggagctctacgccaggacccgcaggggtagtggcgtcatcagccagtctattggcatcttcctgacggcaagagccgaggagcgcgccaaagagacctgtaaatagaagtaattttttaaacatagattgcattatagaacaattcattttgatgatatagtaccagaccaagggcagcgataaccacttgccacagccagtactactacggaaggagagggaggtgaagaggctccaaacacctaaaattcgaagcttcagggagcctaatcgcctacaaagatacactttttatcaaaaagtcatctactaccctcccccgtaggagcgcagctaccagctgcgctccttcagccaatagagggtattagcactccctctcgtatcccttgtgacgcgatcatccaccagcgaagcaccagagcgcagaatcggtatgcagggcggattaatattctcatactccgtcgagatgccttccccccagtagtagatcgctttatcattacgcgtgttgaagggtagcgtacgtgagatgatcgcattctgatccaccgtagcccagaaggagggatgcatcagatagtagaactggttgttgatatcgagattcgacccgatatagtaggtatccagcttcatcttctgatcggtagggaagctaattcgcacggctaccttatacatattcgtgcgctcatagccccctggcttacctggcttcgtatatccgccttccttcttgcggtagttctgcgtattgatatcggggtcgatatacataatcccgtagagcatattatcacgccagctatagaagttcgccatatcatacatcccaaagggcttgggctcgagcaagacgcgcttcgaattagggatcacagaggcgatgcgactatacccagtgccccaattctgtacagacccactcgtgagcgtattgtagttcaccgtgaggagcgtaccgatctctgtccagtagggcaggcggtaggcattcttcagctcagcacgcatattggcggcaggcatcttctgcgcatcagcgtacctcagccaggagcccagctccagcccattatggacatagaggcgctcgataggcagcatcggacgaaggagacgtagcgtcatagagtaagagtgacgccccttaaattcatcccccgtagagcctaagagatagcgcgtaccgaactctggagtcagctgcttaggatcgcggctgtagctacttgcctgggtcgtaggtgcagcgcccgtagccttcttcattgtaggatgaccatagaagagcgtctgacaaaagttccggatcagcccattcaccgacttccccatggctgcaaggggcttcgcagggtccgtgggcatgacagccaagatatagcgaccagcgacctccgtagcttgattccccgagcgtgcgttgatctgcgtagggaagtccttcagcgtaaaggtgctgacgaagtgaacgccattgacgtaaatccattcattagtgacgcccgtcttcttcgtcccctctggcgtccaatacgcattcggctcgatggagggagtggctgaattgaatcgactatccccagcaccgagcgaagagaagtcatagacaccctcggtcacgaggcagttcgactccatcgtgatcttcggatcgagggtcataggctgactcatgtagctcgccacacgcagctcaacaaaggcggcctgcggagtgaaggtcatacgatccgtgcgtgtctgcccagccgtcaccttgggggtaatcttcgtgccatccacctggacctgacgccagcccgtagcgaaggggacgaccatcgagaggcggtcaccagcgccgaccttgctcagggacatatcggactcatagtcctccagctggtcggcattcttcagcgcgcggttcagcctgaaggacaccttaccaccagagatctcagcaccaccgaagaagcccatcatataccagtcatgcgagggatcaaggctcgcgcctgcgcccagctcgacgctctgcagcgtgagtcgcgtcttatcagactggccagcgaccttctcgaagcggactccccactgagcctttgccagaagggtcttccctgccgtcttatcatagagggcgagcacggacttcaggctatgctgacgctcagcaccactgccattcgtagtgcggtcgaagtcgatcttaggaacaatatgggtatgtgtctcctgacctgccgaataggcatctgacttgaggacaaagggtagcccttcatgggtctcgacatggctggcggagttgtaagccccacgagcgctctgtgcagtggcagcgataggtcggtcatcgacctccgcctcgagctcggcagtataggtacggcctgggcgccaggcttcagtcacggcagcctctctggctgtcgccgtcgtcataggctcggcctgacggcatgaagagaaggagagtgctgacaaacctacgaatagtgccagctgtataggtagaagttttctcatcttatcgggattaagggaatagggatgatggctacaggatgtctgtacggatatcctcacggggggtcaagtcgggtcccatctcgggatcatcaacctcctcaaggctgaatgccaccagcatactcataccagtacggagcttgaagatctcccccttgggaggatcatacggctcacgaagcgagtaaatcatcttcatagacaaatacattaaaatgtgtgtacgatacacccccttcgccaccttggctaaaggggaaaagggtggcaaatttataaaatagttacgaaaagtccatcgaatcttcccgcaagaacacggctcccacatcaaaatccccacctcatctgcaagctggattgtagcagagtgatttgcaaatgactactggtctgcagtcaaacggctattggtttggggtgcgaacaactactcgcttgacatgcaaaccactagtcatttgcaccccgaagcactactgaaccgagtgcaaacaactattgctaccaccctaccctcccgcaacgtcacggcttcctgtctcctcaagtaattattcctttgcgaagggacctatacggagaggtggtgtgaacctatataggtcgatgggcgaagctatataggtcacgactgcaaccaatataggtccgcgacgcgaccagtataggtcggagcagtgaccaatataggtcgacaccaccctcccgtagtgcttaggcgatcgataagtcacacccagccaccccaaccgacgcacagtcctcacccacagcacaaaagaaaggcgagccgacccacagacagtgagccggcccgccaggggaatgagcaagaatgagtgtgtgctatttcttcgtcagacaagctgcacaatagcaaaatgatgtgccctctctttcaactattgaagcacgaccaccactgagatataaccaatccggttggaagggatagaaaatgagaagagtacatcgaccatgcactatagggtaaaggataagacgctacacctttgttctctgcgggagcccctccttgaaatcatttgtaccagtttttttcggagcgatatatttgcagatttgctctgctacctccaccatctgcgtcgtgaaaagacaaggaattccatcctcatcaatccccttatcatattgctttgctcgcgatagcgcattattgatcagcttaaaggcctttcgtggatccataccgccaaggagcaactgactacacagacctttgagatgcttaggtcgcttaacttcattaagtgagcttaaagttgatagcttttcctcaggatcctcctcgcaatagctataatacagccacatctcaaagcaaggattactaatgatccagcgataaggcacatcaccttcttctgcaaggagctcctgtagttcgaatcgaaagttatccaaatcggtaaggaaaaagacccgatctatcccctttacctgaaagctctcatcattcaccgtcacctcatgcgtctttacgtcataagcattccgccagtaagtcttcatatctcgaggagaagaccctaaatgagactggctattctgacccgacctttgcccttgaggagaaacaaagagaagcttgagagaggtaattccttgcctctccagctgcctgaaataatcacgctcccgcttctcacctcctgacaggacaaagaagagagcaggctccctctcccccctagccctcggtgtatatgcttcggaattgggagggaagaaagatatctctaccccagaaggcatggaaaccacttcctgagaagaggcaaactgaggacagagagaccttttcccccgcttcggattgtcgtagtgcaggtcacgcattggactcaagttcgatagcgccttcgtagctacctccaaaacgcccctccctatagcctcggcgtatcgaagtcgtatggtgtagcttaaactcatccaatgagtataaggtgctacttcccaagaccttctccacaagccaaatctcatcgctacgtagcaagcgattttgctccatcaactcagtctcatgggtagaaaaaatcagttgccctcgcgtagtcgatttgccaaagaagcgcaccaaatcaaagagcaattgagggtgaaggcaatggttgatctcatcgataaagactgtcttcttggacttcacggctgaatagattgcagggagaagggtcaagaggcgcactgtcccatccgattggtcctgaatatctaaatcaaaagttccggcttcgctcacttgtttgaagagcaactcctgcaccttcatcttcccctgctccgataaagtcgaaaaaagagggcgacgagtcgaagaatacgcactaagcacctgattatcttttagttgaccaaaatcctcacttgtgatggacccactatgactacggagccattcgtccgcatccgtagtatttacctccaccccatcaaccccaatagaaagttgtaaaaaaacacgattgacaaagtttaacaccttttcattctggtctaataactcgataagccgtggcagttcggagtgcatcccaataacagaaagctcttctttaaaccaactataggccctcgcaaccgccttatcctccagaacagggaaggtcttgagcagcgagagaaaggaagcatagcgatggctctccccaagcatgcgctccacaatatccttggtatgttgccactgctcttgttgagccttctgcaaagcttctccaagttcgacagtctctaaagcccggtggtaaaggagagtattctctgaccctacacctgagaggtatagatcctctcgctcaacacctcgctccgacacagcaacatcgtaaataaaaggctgatcctgagtttcaaactccactaagagctctatagggcgcacatcctgattcgagcttagtcggtagcggtgacgtgtcacaaatgcctctgtcaaaaatgcttcttctaaagcaaaacgacgtagggtattgattcccttgaagagatttgacttccctgctgcattattcccatagatcgcagcctgtttcaagaggggtataccattagaagaatagatatgttctacattcccttcacgcttacgattagggaacatatggaactcttgtgccgtttcaaacgacaggaaattctccaagataagacgtagtagcattggtatattcttgtgttgactaagcaaagataaggctttatcttcctatcacaaacacatgcgtgaatttttcacgcttacactcgactatctattataccacaaagcccacaccaatatgaaggcgggccgatccacaacatgtgggccggcccgccaggggaaagagcaagaatgagtgtgtgctatttcttcgtcagcgagaactcaaggatcgtgtgaatccccgtagtccccgagtaggcactcttatagctaccaccctcgaagaggaagaagtgcaggccgtgatgacctcgagtcttcccagcttccgagggagcgaaggggaaggcggggtgctcaatagacaccgcatcccacgtagcggagtaggtgtagtcggcagcccacgtcaggtcgcccgtagccttgccattgggacctgggaaccagccggcatacgaagcgaggatgagcgatgccgtcacgccctggggcttcgcgagctcctgtggcttgatggtcagcgtattcgtcttctcttcgaaggctactgggatatcagcagcgagcccctgcaagatgaagcccttcttagcttggtcagcgatgagtttgacgtctgccgtcttcttctcgccctggtaagcagcgatgtaggtcagcgtgtaatcgccgagcatggcattgtagccaagcgggccataagactgtatcaggcggaagctcttggtgtagagatcactcagcttcagcgtgaggttcgcctcgcgctggaagacattcgtgctctcgaccgtgatgaggagcttcttgtcctcgatcttgaaggatgcccattcaggcaggccctcgatcttgacctcactgggacggatgtccccgacgagcacgatctcgatggtgccgcccttacgctcgatggtgtaggctgactccagatcggagacgtagctgtaggcaccgagctgggagatggctacctgctgggtctcgtcgcctcgcgtgagggtgatgaggcccgtgcgagtcgtgggctcagtgaagggtgcgacggtgaaggtaaccttcgtaccctcggtagcgccaagggtgatccagctggcctccgacttcgcggtgaagcccccttcggcgagcgtgatcgtccccgtaccacctgcagcagtgaagttgtgctcagaggagaggacgcgtagcgtgtgctcggtcttcgtagcagggtcgtccttgcggcaggagctgacacctacgaggagcgtaagcgaagccaggaggagcgccccgagcgagcgatgtatgatcttcatatctcttacttatttcttagtgaatacgggcgaagtgaagcgagagtcaccgaaggacttgtattcgccaccaccgggcttccaaaggatataggagcctgctatgaatgtaccccagataccattatcgaccagcttatagcgcttgcccgtagtataggtctcatcgagcttgctatacataccgaagcctgtgccccacgagaggttggtaccattaggagcagcccacacagcgaggaaggcaccccccgtattctcgagcttctgcgtcttgatctcaaagcgatccttagcagcgtcgtaggtagcgtagatcgtgaggttgcgtgccatacccgtgatacgatagaggttgcgtgcagcctgcgagaaggtgacggtgcgaggcgccgcccagcccgtgcacatcaggtcatactcaccgagatagtgagcgaagccagcgtagtcggggtcagtacgtgccgtgagcttctcgcccgcaggggtgttgtagctcttatctgcatccttccacagcagcgtggagacaccgttgtactccttgtggaactgcaggccatcaggcgtgtagacgtaggggacctccgtcttcttgcccgtctcagcatcctcgatggtgaggatgttgtatccctcattattgaggtaggccacgacggccttgcctccgagcttacccgtcagcccgtagaggtgctgctggtacatactctccgaggtataggcacgagacttcaggtcgaggaccttcgcaagatattccttagcagctacctgcgggcggaacatgcgcatgacgacacccgtcttacggcccttcagatagagcgtatcgggcgagaccgagcgaacgaaggtgaactcatagtcgccctcgaagctcttcccttcgccagccccgtaggacttatcggggtcagagaagaggtgcagaggagagctatacgtatcgaagctcagcgagaccatcttgtcggacttcagatggtagttgctcttgacctctgccgtagagtggcccttcacgggagcatccgaagccatgagcacttcgttcttagcaccgaaggtcatcgtcacgggatagcccccgtagaggagctgggtgtgaggatagtactccagcacccagcccgtggaggaggcggtgagggtcttctgcagctccgaggtgagggcatcgacacgctccgaagaagacttgtcgaagatcgcatcgggctcctgacggcatgagggaagcaccccgaggacaaagcctgcagcagcgaggaggccaagacgggcaccctgcaggacagcccgccctatcgctatattcttattcatcgtagtctatgaattagggggtctgacattagtggaagtactgggtgatgacctggcacttagcgtggtctgcatgctcaccctcctgtagctcgaggaacttcggatggcgcatcagctcctcgacgacagcgtcacgagcagcttcgtagccagcgagcatgcgagcagcctgtggcattccacggagtgaagagccgaggagctcctgccaagagctctcaatgagaggcagacggaccacctcctcaagacggcgctgggcgatagcacggagctgatccatgtcgataccccacgtacccttcatgtacttcttgatgatgtccatcttcttattgagcttcgcacggccttcgtcaccagcggcattcatcaccgcatcccactgactcttggggtaagtgatgtagcaagccgtcatctcagcgatatcttcgcggggctgactgctggcgtaagccgtgatgaagcctagaggcgcgtagtcgctgaggctacggcggttgaaccacgaggtgggagcatagccctcagagatggcgtcgtactccgtcgtaggccagatcttattctggtgcaggatgtggctgaactcatggtgcatgacctggaagaaggtcgtattgagccactgagggtcgttgacgttgagccagttcgcctgatagagcgtgaccttcagcccaccttcggccgtaccgagagtgatggtgccgtcgccgttccacgaagcggagccgacgatgaagagctgacggggcgaagccttgcgcatgaagtcaaggcggcccgtagcttcgtcataggcgccataccatgcgtgctggatgatcttagcgagcttcatgctgttctcgagcttggcaggcgcgaggttgcgtgagcggtcggcctcgatatcatccagggtatagatatagctgacgttgtatgcgtcggtatagttctctttgagccagcggtcgaagctcgtcatctccttggcctctgccttagagacgtgacgagagggatcgggctggtcgctatccttacacccaccgagtgtagccacgaggagggctgcacagagggagagcttgatcttatgtagatacatagtgtctgatctgataagggggttcgtgtctagtacccagggttgggctctacgcctaccgagaggatgctggcagggatctggagggcacggcgatggtcgtccgtcttgagcgtcatcgtctcgcccgtgtaaagcttgtgggtgatctcgatgccgtagcgcttgatatcatcccagcgcgtaccatcgtgcatgctgaggatacgacgagcgtggagcacggcgtgcatcatgttcgtctgcatacctggagcgatgtcgaacttaggatgcaggggcttggagaccgtctcttgcttgcggatcatcgcctcgcgtacatcgtcgggatcggtggggttgatgacgacgttgtagtagtcagagatctgctgagctgtagcagcttgtcccttcttcgagacgtaccaagcggagaggtcgctagcagcaccgtcgaagtcagagagcatcacgcgggcctcagctctccacaagaggacgcggtccaccgtgaagggaaacgccacgacgtggggctgccccgtgcgagctacgacgtcagtgatctcgaagagctcgcgatacttggggtagtagagtgcaccattgttcgaaccgaagaggcggtcatagacggggaagtagcgtccccatgggcctgggctacgataggtctgcgtcgaagctacgtgcccgttgtgagcgtagcggtaggacgtcagcgcacggacccagagtgagcgcgtgacgatgagcatgaggttagcaggctcgtcatcgcggatataggcatggcagatctcatcggcgttggtcagcttgtcgtacttcgacatatcacgcagattggagacggcacctgtaccgagcacttcgtctgcatactgcttggccttatcccacttctcgtagtagaggtagaactgcgtggcgaaggccttcgctgctcgcgtcgtgaagtggaagatgggcttgctgtagcggtcgtcattgatcaagggaataccctcctcaatatccttagcgatgagctcgtagaccttcgccacggagaggcggggtacggcacgctcgagcttcgtctcgggcttcgtgaagtaagggataccgagatccttgtcgctggtacgaccgttgtaggcctgaccgaagacattgacccaaatgaagttggtataggcacggcagaggagcgcttcaccgcgggcggcctccagctccttggggttgccgagttcttcgatggacttcagagcttggttggctgtaccgaccatgctgtagcaggtactccagaagttcgtctcatcgtcccaggccgtcccgctggagggctcccagaagaaggcttcgtgattgccaatgtgattatcctcgaagaggcggccgttgtcctcgacgttgtcggtacggttctccgtgaagcccataggcaggagcgtcggataagccgagacgaggaggcgctcgatcttgtcagcgcggttgagctctgtacgggtatcgggcatggtatccaggtagcgattgcagctaccgagggcgcctgccaggaggcagagtccagccattctatatagtcgtttcatagtgaacatgatcctattgcatgattagaagccaatgtgcaccgtagccgtgacctgcttaggcagcggggtagctaccccacccgagcggaagaactcagggtcttggccatagagcttcttatcggcgtacagcagagcgaggttcgtggcctgcaccttgaaggaagcactcttgaggaagcccaggcgcttgacgagtggcgtaggcagcgtataggtcagtgagacctccttgaggcggacgaagctaccatcagcgacacgagccgtagagtagttgtaggctgcatagcccgtaccgaggttggagtagctgtagtggtcgcgcaccgaggcgatgacagggatatccgtcttacgctcatctccgagggtcgtccagcgattgcggtattccttaggcgtagcccagaggtcggaataggcagcatagaaggaaggatccaggcggagcttgttaccacccgagtaggtgatgaagacgttcagcttgaagttcttgaacgtgaagatattcccgaagctaccattgtaggtaggctctgacgaaccctcatacttgaggaagtccagatcatcgacctgctggaagttgatatcacgatagttgcgacgcgtgacttccttcccattgaccatgaaggtggggaagccctcatcatcaagtcccgtgaaggggatcgagaagagcgaacgtacgggatagccctgacgagcgaagccgttaccggtgaggaagttgaacatattgcgcttcgtatcgagctcagtgaccttattgaaggtcgagccgaagatgaagtccgtcgtccagctaaagtccttcgactggatattcttcgtcgagacggagagctcgaagccgtggctcttcatcgaagcgacgttgccccagcgagtccccccgatcgtataggcagcaccgatgaggtcgaagttgttacgccagtagatgtcagcagcgatgttgaggcggttcttcagcaggcccatatcgacaccgaagttcagctcatgcttcttctcataggtgaggtcttcgttctcgaagctaccgatgtagttacggttctccgactgtcctgccgagggtctccaggccgcgcggctatagatgatggcgcgggagttggtgacccagctgggggcaacccctacgagggagtatgagcccttgagcgtcaggtgtgagaggaggtgctgcttctcgaagaagtcttcgctgtgggcattccatgcaccagagatattccaggtggggagccagcgagccttacgcgtgcgaccgagtctattcgtcccttcgtagcgggtcgtacccgtgatcgtatagcggcccttgtaggagtaggtggcgttggcgaagaaggcgaccgagcggccgaagctcttcgacaggccgtagtaatcccagttcttctccgtgagacgcttgaaggcgcggtagtcccagaagggcgtcagaccactgtcgtactgcataccccagccgtccatccagcgcgagacgcggtcctgtgagttgacttcggagccgaggtaggtattgatgatgtggtcgttgttgagcgtcgtattgtacgtagcagaggcacggaagtcatagctctccatggtgcgcgtctgcgtattgtagaagccccctgcagggaggatggtctcaggcagtgagttgggcttgtcctgatccttccagaggtactggttgccattgcgtacggtagcgtcctgcatagcgcggaaagcgagtgcgcggttggcatactccgtgacgatgctctccatcgtcgtacccgagtccttgtaggcaccgagcagagcgagagtcagccccttgatgggcttccacttcagctcgagctggagcttgacatccttcacaccgaggtcgatatagttgttgtcgagctcgtgcttgatattgaagggagcgtagtcacgggtgtagaactcattggggtcgagcgtgcggctcgtattgagcgcgtaggagaaggggttgatgtcgaagccacgtgacacctcaccagtagtggcgttagcatcctgagtgaccgtacctggagcacgctgcatgcgtgaggagaggttgatcagggcagatactgagagcttgggtgagaaggtataggtagcgttgaggttccccgtgtagcggcgtacgttgctggcacgcatccatcctgggtcgagcatagccgagacggatacataggtctggaggttcttcgtcccccctgagaagctcagtgagtgattctgaatgagggagggagagaagagttcgccgaaccagttggtattgcgcatctctgcatcgcggaggtagttagcacgagcctcgggcgtgttctccagcccgaagacccccgtcgtggggtcgtagtcgtgcgtcagatggtacatcttcccgtagatacccgaggagctgtagttgtagacgcgggcaaagttcagccagcccttacgctccatctcgttgtagacctccatctggtcctgcgagttcatgatattgtagtcgcggtagctgggcacaaagcgcgaggtgaactcccccgtataggagaaggagctgctacccgagcgacccttcttcgtcgtgatgacgatgacccctgccatagcctttgccccgtagatggacgttgccgagccgtccttgaggatctggaagctctcgatatcgtcggcattgaggcctgcgatagccgagctgaggagtgtcgtagcgtctcccgagctgaggtcatcagcgccgacgtctacgacatcctcctggatgaccccgtcgacgacccagaggggcttggacgaacccatgatcgaggtcgccccacgcacgcggatcttaggtgctgtaccgaaggtccccgagaggttctgcacggagacccctgcagacttcccttcgagaccgcggctgatgtcagccatacctgccatcttcaccttgtcggccttgagcttgtcgctcgcacccgtgaagaggcgcttgtcggtggcgaccatacccgtgacgacgatattgtcgagggtggtggcttcgggctggagcttgatgaccatgccgtccttagccgtgacggtctggctcttgtagctcacgaagcgaatgaggagctggttcttgccagcagggagcttgatggtgaagtcacccttggtgttggtcgtgacacccaccttcgtcccaacgactaagacggaggccataggtaggggatctccgctttcgtcgaggaccttgcctcggatggtctgagctgtaccctgggctaagaggtcgccccctaagccaatgaccaggcctatcatcaatagtcctaatcggatccagcccatgcccaatcgaagtactctttgattgttcataagcagtgtgtagtttgtttgtgtaagtgattagcgtgtatgcatggcgatgtgggcgaaggcaaggcacagagctgggtgctcggatcagctgagggatgcattcctcccatagtatcgtgtagctatctcttcatacagtatcgtttaatcgtgatggtgtccggtgacagagtagaggtcaagggtagctcatactgcgggaccactccatggtacattgggctcgcggcgctacaccttcgattggcgtgctctatcgttgtcaaatgtatggatttcccttatacactccaaaagctcgggctaaataaaattcacgctaggtgagctgccgaaaataccgaaattccctcgcgctaatatttcctaaaataattgcctttcatagctatgacaaaaggatagcactcacaccatatttagacgctctaccctaccccaacccctacagattgccacatttccccacgattctgtggcacaggctcccacctaagcactccacgaagaggtaaaggaaagcacaaatacccttgtatttcataccgtatttgcccctccttcggggtcattcttcacctcctcagagaggcttttctgaggggctgtagcacagagcaatacgaggctgggaaagtaacctatagtggtcggtgggtgaaccactataggtttgcagtagcaaccactactggttcgacgctggaccagtagtggtcggtgagcgaaccagtagtggtcggatgagtgaccactactggagactgttgctccgcgtagggataaaagttgtggacgagtagcagataagtttggactacgcacgtggctctaatatctccgtacgtggatatttggatttacgtgcctggtctttaagactacgtacatagatagaagaataccactacgggaagacgcttttttcttcacgagaaggacacttttccctcggctggataagaggaatactcgcgataaggcgaaggacttgcgtatctcttcggagaggcatatcggggagctgggtgcgcgacgccttagcactctaaatagaggacaggactctgccgcaacagtctctactggttgcattcacccctccgagcgagtagcaaaaacaaaggggtatcccgatgacgggataccccttactatagagtcgagagagtagctactctccactataatcgtggtcatacgtattgaccacgatgacctgtatacagacttcctctacacggtagattaggcgatgacgcctgctgatgcgccgactccagtagccagctaagtttcctttgagaggctcgacctgccccgtccccgtcagaggatgctcctgcagctctaccagcagatccaagagcttcttatacgcctggggttcgtgtcgcttgagccgtcggatgccctccgtcgccttgtccgtatagaggacttcgtacatcgctaaagggcatccaagaaagcctgcagttcctcgggtgtacggacggacgtatagcgccccgcacgcaaatcctcttctccagcctcgatgcttcgctgtagcatctcttcttcatgaggagtcaagccgttttcagtcagcgcttcggcctgccctatatggagcatctgcccctcagaggtaacgatacgaagcccccgctggagtgcctccttgaggtagcgctccacattctttgcaaatgcctctgctgttatcgttgtcatagccatagttacttcgttatcatctatatgagtagtacaaaggtacacacttctctcgcatcagaatcttcgtaagagatgcaaaccaagaaggccacccttctgcctcgacaaatctccccagcagttagcttctcttctctccaccaaaaagcagcgcccccgaaggatgaccttcgggggcgctacttatatatatgtatagggcttattcgctggggaggatatcgccgaggatagctgccgtagcaccgcactcctcgctgaagtaagcacgggtacgtgcctcaagggccttgcactcttcctccgaagagaagcgctggagaagctgcgagagctccgcccgatcgtgcaagatgaagcccgaagagcgcttgaccagctcacgcacctcacggtgcttgtggatctctgggccgaagaagacggggataccatataccgcagcctcgagcgtattgtgcacgctcttgccgaagccaccgcctacataagcccacgtgccgtagcggtagaccgaggagagcaggccgaagcagtcgatgatgatgcaggccgtgccctcaggcagacccttcgcttcgtcatactcggagaggcgaatggatggacgcttgagccccgactcgatagctcttaggtgctcctcgtggatctcatgcggtgccaagaccaaggcgaagtcctcgggagcctcctcattgaagtaaggcaggaggatagcttcgtcctcgggccacgagctaccgacgaccaagagacgacggccactagccagctccgctaccgcagggatatccttcgctgcacgggcgatctcctcgacacggtcgaagcgcgtatcccctgtgaccttgaccgactcgacaccgtgctccagaaggagcgtgcgcgaagcctcatcctgcacgtagagacggcggaagaggtgcagcagacgcaggtaccagcctccgtagctacggaagaagagctggtcgaggcggaagatcgccgagacgaggtaggtagggatagagcgcgtagccagctcgctgagcatcgtaggccagaagtcgtacttgatgaagacagctaccgcaggatgcgccagatcaaggaagcggcgcaccgatgaggagcgatccgaaggcaagtagaccacgacatctgccccagcatagtcccgacgcacctcatagcccgaggggctgaagaaggagagcaggatctgatactcgggatgtgccttgcgccacgcctccataagcggacggccttgctcgaactctcccagcgatgaggcgtggaaccataccacgggacgatccgcagtgaggcccttgagacgctgaggagtctcccgacgcccctcgatgatgagacgagccttccgatggaagggggccaccagatgcagcagcgccgaggctgctatgccagcgaagctatatagaggattcatgcagtgggtacgacccgcttagcccaggacctcgatagcacgctgcagacgctggagggtctctccacggccgagcagtgcggtgatatcaaagaggtggggacccttagcagcaccgacgagtgccagacggaagcagttcatcaccgcaccgaggccatagcccttctcctcgatccaagccttgacgacctcttcggtcgcttcgctggggaggtcttcaggctgggtggcgaggagtgcagcgagctccgtgagctgggctgcgctgtcttccttccagcgcttcttcacggtcttctcatcgtaagccgtgggggcggtgaagaagtaagcgatctgctcctcaagctcggggagcgtctgagcacgctccttcgtcagggcgatggcgcgagctacatagtctgcgtcgaaggtgatacctgcagcctcgaggctggggcgcaggagggcagccagacgctcattgctagaggtctggatataatgatggttgaaccacttgcccttctcgtagtcgaacttagcaccagccttgctgcacttctcgatacggaagtagcggatcagctcttccatgctcatgacttcctcgtgatcattaccggggttccagccgaggagtgcgacgaagttcacgacagcttcgggcaggtaaccgctctcgcggtagcccgaggacacctcacccgtcttgggatcgacccagcgtagggggaagacagggaagccaaggcgatcgccgtcacgcttgctgagcttaccgttgccctcgggcttgaggaggagtgccaggtgagcaaagcggggcatcgtgtcgcgccagccgaaggcttcgtagagaagcacgtgcagcggtgcgctgggcagccactcttcaccacggatgacgtgggtgatacgcatcagatggtcgtcgacgatgttcgccagatggtaggtaggcaggtcgtcagcactcttgtagaggaccttgtcatcgaggacagagctattgaaggtcacgcgcccacggatcatatcgtcgacctcgacctctacatcgggcgtgacgaggaagcggacgacatactgcgcaccgcctgcgatgagagcatcgacctcctcacgtggcaggacaagcgaattgcgcatcgaggtacgggtcgtagcgtcgtactggaagttcgctaccgtcttacgcttctcctccagttcctcaggcgtgtcgaaggcgatataagccttacccgcatcaaggagctgctggacgtacttgcggtagatatcgcggcgctcgctctgacgataggggccgcagtccccaccatagctcacgccttcgtcgaagcggataccgagccactcgagggcctcgatgatataagcctccgccccagggacgaagcgctggctatctgtatcctcgatacgtagaaggagctcaccgccgtgagccttcgcgaagagatagttatagagagctgtgcggacaccgccgatatgtagcgctcccgtagggctgggagcaaagcgaacgcgtactgattcgtgtgacatagtgctatggtgatatgcttgttgtgtggatgctgatgtgactaccgcccatcgtcggatgggagctggagcgtccagcccgtgtggctgtcgagttcctgctgtaggagggtgaggctctcggcctcgagaggtgccccttcactcaaggggcaggtgggggaaatgagatgtatggtacctgaaaggaatatcgtgcgctccccttcgccgacgaagggagctaagatgaagctccctggcgagtgctcctcgatgaggaccgagtgagcgacccagcgcccgaggcgcaggtggtgactggcatagcgaggacggggagatcgggacatggggagtggttagagcgccgtaatgccgtcgccatcggagagctccgtagcgggctcttcagcctgaggctcgtcggctggagtgggtgtaggctcgggggccgcacccgtatagcggacaaggctgaagctatcgacgacgaagagcgggctcttgctcttggggaggcgaccacgcagcagcccataagccgcacgcatcatcttaccactgggtatggtgatggcgacttggttgaggccaggatgtagggagggaagggtctcggcttgctgcgtagagtccgcatactgcagacggagctggagctgaagcgctgagggagatgccccgcttacacggacgatgaagcggagctccgtaccgcccgtatagctgacgctgggctcgagggcgaaggagcgctcgacgtagctccctgcgaggtagcggctggcactatcgcgtaggaggttcaccgagtcaatatcgtgcgccgcccacaggctgcgacgtcgctcgatgcggtcaaggctatcgacacgtacctgcagcgtcgcttgacgggactccagcaccagagcagcgtgctcatagagcttctgatactcgacgatctgatggcgtccgtaccagacgagcgagctatcccagtcggccagcgtatagccatagcggctgaggatggcttggaagcccacgatacgcaggctgtcctcgaggcctcgctggttgaaggaagcctctgccgtgagcatctcaggcaggagttccttgaccgtcttgaggtcgatctgcttccacttccccttagagccaccgcaggcactccccccgacaaggagaagcgccagcaagagagccttcagtaggctgcgatggggaagggtgaagcgagacgacatagggcaagacgactaagctattcctccgtatccgtctccgtagacgtatccttatcccgtgaagggaagagggtatccagcgccgtggagaacgtgcggcgatagcagaggagcaggagcgccacacctacagagatgcaggcatcagcgaagttgaatatcgggctgaagaagacgaactgctcaccggcatggataggactccacgaggggtaggtcgtctggatgatggggaagtacagcatatcgaccaccttgccatgcaggaaggtgccgtagcctttgccccaggggacgagctgtgccacagccccgcggctcgtggagaagatctccccgtagaagaggcagtcgatgacgttcccaagtccaccagcgatgacgagacccagcgtcaggcagaagccgagtgagaagcggcgtaggcgcagcagacgcaccagatagtacacccctgcacccatcgccagtatgcggaagagcgtcagaaggagcttactaccgagcgtgatcccgtaggccatcccttcgttctcgacgaagtagatcttgaaccacgaggtgatctcgtgcatctccccctcgaccattgaggtcttgacccagatcttcgaggcctggtcaatgacgagtaggaggacgataaacgccgtcgtccagagggtcgtcttggagcttcttgtcatcagtcgcgtgggggcttacttcttctcttggagcttcgcctcgatagagagcgtagcatgaggcacagcgcgcagacgctccttggggatgagcttaccggtctggcggcagatgccgtaggtcttattctcgatacggcgcagggctgcctggagattgtggatgaacttcagcagacgctcagccatgcgacctgcttcacccttggagagggaagcagcgccctcatggactgccttgaaggtgggctgtgtgtcggctacatcattgctctgatagtcgacggcactctcacgcaggagatcgtaatcgcggatagcttgctcgagcttctgcatgataagctcacggaactcctggagctcctcgtctgtgtaggaagtcttctggtcactcattgtatagttatctgaattgtaggcagggcggaagagtacacccgccctgcccgtgtgttagtttgccttctctatatagatggggatcatacgttcgtccagatcgagctccagcgtgggtgtgaagcccgtctgctcctcgatggagactgcctgcacctccttagcgatataagccgagtagacgctgagcacacggtggagctcttcgtcctcgggcaggaggatgcgtaccttgtcactgacctcgaagccgctctgcttacgcaggttctgaatgcgattgatcagctcacgagccgtaccctcgaggcgcagctcatcggtcacggtgatatccagagcgatggtcagcgtgccttcgttggccacgagccagccagggatatcctctgaatagatatcgacgtcgtcgcggaggatcgtcacaggagccccttcgaccgtgaagtcgatctggcccgtgcgctcgatcgtagcgatctcgtcttgcgtgaactcagccaccacagcagcgatagccttcatgatcttgccatagcgtgggccgagcttcttgaagtcgggcttgatacgcttgacgagcactccttcgccgtcggtgacgaactgcagctccttgaggttcacctcactgaggatgaggggcacgacgggcaggatagcctgatggtcggcctcgttgacgatggggatcatcagacgctgcaggggctgacgcaccttgatattgaccttacgacgcagggccagcaccatcgagcagatgctctgcgccaggtgcatgctgcgctccaggctctcgttgatctcctcacggcaagcggtggggaagtctgccagatgcactgagtgctccgtagcactggtgcccttgctggtgaggtcacggtagagctgatcagcgtagaagggagcgatgggcgccatgaggcgagccaccgtgaccagacagcggtagagcgtctggtaggcggagagcttgtccgtggtcatctcaccagcccagaagcggcggcgagagaggcgcacgtaccagttgctcagctgctcggagacgaagtcaccgatagcacgagcggcacgcgtaggctcgtagtcctccagatcgctatcgacctcgaggatgaggctattgagtgtagagaggatccagcggtcgatctcagggcgctcagcataagggagctcctcacgagaggtaggatcgaagccatcgaggttagcatacagcgcgaagaactgatacgtattgtacagcgtcgcgaagaacttacggcgcacctcatcgataccctcgacatcgaacttcaggttgtcccaaggcgatgagttgctgatcatgtaccagcgcagggggtcagagccgtacttctcgatcgtctcgaagggatcgacagcattgcccagacgcttactcatcttgttgccattcttatcgagcacgagcccgttagagatgaccgccttgtagctattcgtcccacgtaccatcgtagcgatagcgtggagcgtgaagaaccacccacgtgtctggtccaccccttcggcgatgaagtccgcggggaaggcgcgaccgctgtcgagcagttccttattctcaaagggatagtggagctgtgcgaagggcatagcacccgagtcaaaccacacgtcgatgaggtccgtctcacggcgcatgggcttgcccgagggcgagactaagatgatatcatcgacatagggacggtgcaggtcgatcttatcgtagttctcctgcgtatataccccaggggtaaagtccttccaggggttagccgtcatgaagccagcttctaccgagcgctcgatggcgtggtagagctcttcgacggaggagatacagatctcttcacgaccatcctcggtgcgccagatgggcaggggcgtcccccagtagcggctacgcgagaggttccagtcctggaggttctccagccacttaccgaagcgacccgtaccggtgctctcgggcttccagttgatggtatcgttgaggcgcatcatctcctcacggcaagccgtggtgcggatgaaccagctatccagcgggtagtagagtacgggcttgtccgtacgccagcagtggggataggagtgcacgtgcttctcgatcttgaaggcacgaccctcgcccttcagcagaagtgcgatcgtcacatctaaggtctcatcctgatcggtgagcgtgtcgtcgtaggcgttcttgacgtagcgtcctgcgaactccttatatatgtctacgttgacaaagtccttgacgaaggcgggatccatatcctccagacggaagagacgaccctgcatatcgaccatggggcgcacattgccatcacgatcgaggacggtcagccctgcgatgtcgctggccttagccaccttgttgtcgtccgcaccgaaggtaggtgcgatatgcacgatccccgtaccatcgctcgtagtgacgaagtcgccagcgatgacgcggaaggcatccccatcgggacgcatccaggggaggagctgctcatagcgcgtacctacgagctccttacccttccactcgccgacgatgacgtaggggagcttcttgtcgccaggctgataggctgcgagtgcctcttcaccttcgtgctccttgctgaagagcgtgtgcaggagtgcacgagctaccacagccgtgataggcgcacccgaataggggttgaaggagcggacggctacgtagtcgatctcgggaccgacgcagagagctgtattcgagggcagcgtccagggggtcgtcgtccaagcgaggaagacggcttcaccatggcccgtcagctcggcacgtgggtcgatgatgcggaactgtgcgacgcacgtcgtgtccttcacatcacgatagcacccaggctgattcagctcatgcgtactcagccccgtacctgcagcaggcgaatagggctggatcgtgtagcccttatagaggaggcccttcttatagatctcgctgaggaggtaccagagggtctcgatatagcggttgtcgtaggtgatgtaggggtgatccatgtccacccagtagcccatgaggcgggtgagctgctcccactcctgcgtgtacttcatcacctcacggcgacaagcagcattgtattcgtcgacgctgatcttcttgccgatatcctccttcgtgatgccgagagccttctcgaccccgagctctacgggcagaccatgggtatcccagccggccttgcggtcgacgcggaatcccttcatcgtcttgtagcggcagaagatatccttgatcgagcgcgccatgacgtggtgaataccaggcatcccgttagccgagggaggcccttcgtagaagacgaacgagggcgcgccttcgcgcagggcaagcgtgcgggcaaagaggtcttcctcctgccactgatccagcaccttcttattgacccccgagagctggaggttatcgtattcagggaacttatggctcatacagcgtctatattatatcgtcgtcgggaggagcgacgagccgagtacggctacaccccatcccaaggtagttcaaaaattgatacaaagatacagctttccatcgacgcagatcctatgcgtaccatccgatctccctgcacctctcacctctctatagaagtaacgtaaaagagagcgcccccacgtagtgtgtccttagacacacgctacgtgggggcgctggtttataatgcgtagttgtcggaaggcctaaagctttttacgaagggtcagcgtggcttcaagatctggattccctgcatttgcttggaagaccaatagagacggctccttgcggatcagataccatgtgttttgatccatcgggggacgaagttcacgattaacctgagcctttagtgtgaggatgcgatccgttatcgtatagtaatagcgaacctgcaggtcacgggagtacgtaggatctttcaaatcgtaaccactaacctccacttctgagtccgagaggaagttcaggtaaacagaataggagtcacgcttggggttcttatattccaaagtcccattccagaccgtctgacgaagctctactgatgagagttggagtcgaggcgtgtccttcttattcttacaactgctggcgaggaaaagtagccccaataggagcccacagaagctgagtattcttcggttcatagttccattaagttatgtaggttatgtatttgatttgctgatctgatgaaggctggtatcacatagagagaataggcacacagagataccgataagagtagaggccgattgcgcgccctctctcaagtgaagacaaccttcggagcaaaggtagcaattaaatcaatcggacaagagggtcgttagacgaggacgcaggacaagcggagcaacaaacttgaggggggcgctacgtacccatagtggtcggtggtatcaagcaatagtgaataggtatatagagctatataggatggcgaagaaaactatatagctttgtgaagtgacctctattagtttgttactccgcgtagggagaaaagttgcgaacgagtggtagataagtttggactacgtacgtggctctaatatctacgtacgtggatagttggattgacgtgcctggtctttaagactacgtgcgtagatagaagaataccactacgggaaggcgcttttttcttcgcgagaaggacacttttccctccgctggataagaggaatacgcgcgataaggcgaagggcgtgcccgatcacttcggagaggcatatcggggagctgggcgtgcgatgccttagcactctaaatagagtacaggactcgcagcgacagtctcaaacaactattgcttcacaccacgctcccactgagcagtccgtaccaccttacatacaagcccttctttcccctaccccaaagacaaagagaagcccccgcccacagacgtcacttcgtctgtgagcgggggctatcccgtagggtatttgctttgaggctacgcttacagcttgtagctcagcgtcaccagcgcattggtaggctcgttggggaagagctgcgtaccattcaactccgaggtgtagttctttgcattgaggacattgcgcacctgtacagcgatgccgaagccagcgggcagacgataagaagcaccgaggtcaagctgcgtgtaagcagggaagctcagcgactgcgttacgttgtagtacatagcatcgcggtaactcaggctatagttcagcgagaggttgcggagcgtaccacgctggaagtcatagttcccataggtaaagaactgcttgcggggtacccagctcatcggcgtaccattatgcaggttcaatagcttagtcaccgctgtttccttggcatcggctacgtggatatccgtatagctatagccagcgaccagctcaagaccagccacggggcgataggtcagatccgtttcgaagccacttccttcggtagcaccaacctgcgctttaatgctatagtgcttgggcttaccgccctcttgttcggtcaccacagtatgctcaagctcgttattgcgacggatatgataagcggagagattgagctggagcacatcagagagcgtgtagcgagtgccgacctcgaactggtagcccgactgaggatcgaagtaagcaccaccacggcgacccgtgatcagcttaccatccttatcgtagaagcgctgacgattcgtatccagcgtagtcgtcttgtcggggatatagaagctacccagcgacgtatagaaggagagcgcctccgtgggctggtagacgagaccgaggcgatagctgatagcgtcgtccgaactcttgttatacttatcacgagcgatatcatcatagctatgcttaccatccttgatcgcaagatctggggtatgacggtagctgtagtgatcatagcggatcgcagccatagccttgatcttctcagagaactcaaagacattagagagcgcaaagccgtgtacccacgtgtgctgaggcgaagccttagagagtgtcgtctttatgtgcccattgaagctggggttataggtcgtgttctccgagaaagtgagcgtttccccatcgctatcgaaggtacggcctccaccctggacgtccgtcccattataccccgtataagtggtacgctgcatgtaggtcgtgctataagcgaagcgcaggttattcttcacagagccaaggaagaagctacccgtcagatcgacggtattctgcagcgtcttagcgatgtgctcgaagcgcagggggaaggtgaactggacgtgattcagatcgtagtacgtcttattccctgcttcatccttcgtatagtagccgtacttagcaccagccgtagagctcgtaggatagctcagctcttccgtgctgaagtaatcgatatcatcgtaagcatacgagacatagtcagagagcttccagcccgaggggagcgagagcgtgtacttgaggctaccattgtaggcgcggttgtacatgaagtccgaggcatcgttgtagcgccattcgcgcttgagacctggaagcaattcacccttcttgaggtagagcttatcatcgctcacgcgatacatatcgtcctccataacaggggcaagacccgcatcggtgccgtagaagtcattacgaccttcgaggcgcaggatgaggttgtgaatccccttcgtatagctgagagacgcgaagagcgagcggttcttgtcattcgtagagcgccactgcttgcctccagagaggaagccaccagcgtagaagtgcagaccatcagtgatcttccccccgacattcgcacccaggtcgaagtagcccagtgagccaccacggacgtgagcaccgaggataaacttctccgtagggacgcgacgcgtgacgttcacgacgccacccgtagcagcatagccatagagcaccgaagcagggcccttgagcacctcgatctgatcgacattgtagaggtcacctaagggataggagttcagcgtagagcgttcgtcacgaactccgtcaaccatgtagaccgtgttgtagaagccacggacagagatctcacggaaagcgccaaagctggacttcatctgcacggcaggcacgaagcgcagagcgtccttgacctgcgtgatagcgcggagggagagggtggagtccgcgagcgaactaatcgtaagagggagcttcttggcagggacacccagcgggttgatcccttgctcctgtcgtaggcgtgctgtcacttcgacaccttgaagatgacgaacggagtcggcaggcgtgccctgtcctgcccacgcaggtgccgcaaggcacagcgcgctcaggagcgagacggtaagagtcttcataaatgaatcgtcaaaatctaatttaagggttgatgtaaaatagttatcggtcttggtctgctcgggtgaaggcgagccgtaggcttagcacctcccgagcatttccgctgcaaaggtagcccttttataccaatttcccgaaagatatccaccagatgaagcctcaaaagacgctacactctggcctctacaagcacactccacgcttctcaaaagcactacctttgcgctcggcaaggttcattccaacgccctttaccctttcaatgaagcaagagcaaatcatacttctccgtggcgtcatgcccagcggaaagaatagcatccccaagatggctgtcctacgccagcacctcgaagagatgggcttcgaacgtgtacgcacctacatccagagtgggaatatccttctacttagcgaccttcccaaagaactacttagccagcgcatccatgacctcatcaaggagcgcatcggtgcagacctcacggcacttgtcttcctacccgaagagctgcaggcgtgggtagacagcctacccttcgcagatgaccttgatcccagccgcatcttcttcaccatgactatggcgtgtcccacagccgaccgcctacaagcgctcgccgagaagacttggggcgaagaagcagccctgcatctcaccgagcgctgtgcctacatatacgcccccaagagctataagaatacccgtctcaccaacaatgctctggagcgctacctcggtgtgacctgcaccacacgcaacctcaataccatccgtcgcctcctctccctctcccgaggcgaatagccagcaagctgccccctcggcatctctcccgtcctccttcaataaaaacacacgcagcacgcgccctatgggacttccatcgggcgcgtgctgcattatatataatggtcggactatcacatcctaccgagaggatggctcttccctcccgacgacaggctcacgcgatagcgtagatgagagcgcaagaccagagcccatacctcccaaacgaagcagtactggtcgccgaagcaaccactactggtctcgacacgaagcagtagtggtaacatagagtaaccactactggtccgaacgctgaccactactagttcgtttctgagaattatagtggtatgtcctcagcaaaggaaaaggaaaaggaaaagggaaagggaggagacagataaaggcaagaagctaaggcgaagcatcgagggcaggggtctttatccgacaggcgtataaacgacaatagggtgacgaagccgcatcggctccatcccccccctaccccatagatctatctgtagtatgcgactgcatagcttggtgcctcatccctcgctgcatcacaccttgctacggcatagcaagctgaatagcagtaaatggaatggtagcaagcagcaagctcactgcatcatcatcaccttgcataaaacgaagtgggtgtgatcacttgcgtaatcacacccactctccttaaaatggcggctacctactctcccacaaaacgcagtaccatcggcacgattgggcttaacttctctgttcggaatgggaagaggtggaaccccaacgttataaccacctaaatatctctgtatttagacaatcattgacttgataaaaacgctcgatactcactcacgtatcgctaagtcggtatacaacctcttggcaaaaactttcgggcaattagtactactcggctatgacgtcaccgcctttacacctgtagcctatcaaggtcatcgtctataaccacccttataatgagatctaatcttgaggcaagcttcgta

SEQ ID NO: 75 - DNA, 105666 bp, Porphyromonas bobii
  source 1..105666: mol_type = genomic DNA
cggctgcgacctccgagaggtcgcagccgctgctgtatttgtgagccttatagctcggggacttcaattagagcttgaaggtaacaccgaggttcaggttgtagaagccgtagccgagttcagcgaaggcaccgatcttctccgtgaagaagtagcgaccaccgaggaagatgctccagtcaacgcggctacccttgatatagtttgcgaaggcatcgtaatttgaagaaacgatgtcataggagagcatcagacctgcataggtgtcgagcttgggggcgaactgatagtggaaagcaccacgagcaccgaggacagcataagaaacggtgaccttgtcagccgtccagccgctgaagttacttgcagcgtaacctacgaagcccccaacagagatagatccgttgttgccgttgatgaggttgtccgtgacaccgtagtcaaggctaacggagaggggagggatagagaggctgttgtagtaagagccgagaccgataccagcgttgatagccgtggtacccttgtggaatacttcctgagcgttagcgatgctgaagctacctacgatagcgaggacagcaaggaatactttcttgaacattagtttatagggataagtgaattgtgaaatcgcgagaggaactctggtgaatccagaggctctgcgacgcaaagatagtggtaaaccttcagagaagcaactacactcgtttatagttgagtgcgttgcgtgtctctaaaggttggggaggttacttcgcttcgctcttggggaggaagcgactgaggagcatgtagcccacgacaccagagatgatcgtgccggcgaagataccgagcttagcttcgttgaggagctgtgccatctcggggccgtcgtaggcgaggttcgcgatgaagagcgatacagtgaagccaataccgccgaggacggcgaggctgatgaggcgggggaggttcatgccttcgggccaagcgcagagcttcacacggatagccacgtaggtgaagaggctgatgccgacggtcttcccgaggaagaggccgaggaagatagccagaggcaggcctaagagcatatcggcagagactcctccgaaggacacaccggcattgacgaaggcgaagagggggaggatgaagtagtctaccagaggcttgagtgcgtgctcgagggtctggacagggctgatagcctgccctgcggtgctcttgatctcggcgatgcgctcgagctggtcgtgcgagaggatgactacacgctcagcctcacgggcttcggtagagaggtcgctggtctgctcgtggagcttgcgtgagagctcgcggatgtggaccttcgagcctgcggggatgcagagagctacgagtacgccagcgatcgtgggatggatacccgactgcaggaagagtgcccagacggcgatacctgcgatgatatagggctcaagggcggtgacgcgcaggcgaccgaggaggaggagaagggcgacgagtgcgagaccaatacccaggggcaggagtgatacgcccttgctatagaagagggcgatgacgatgattccgccgatgtcgtctgctacagccagcgtggcgaggaagacgtacaggctcttcgggacacgaccaccgagggagccgaggacggccagagcgaaggcgatatctgtcgccatggggatcgcggcaccgaggctctcagggtgattgggagtcacgccgaggaagaagaggacggggaagagcatacccccgagggcagcgatgacggggagaatggctttcttgggcgaagagagttcgccgacgaggagctcttgcttgatctccagcccgacgaggaagaagaagatcgccatcagggcatcgttgacgacctgactgatggtcatcgtgtggcccatgtggcggaagagttcaatgccgccgatgatgacctggacggggtagtggaggacgtgcccgtagctggtgctccagggggagttcgcgatggctacggcgatgatggtcgccaggaagagcaacatcgaggggttggggcgcaaggccgagagacgctgtcgtagagagggcctttgagcgggagtcgtactcatctttgttttagaggtttgtaatgaaggtattgcatcgtgcgtacgtcggtgtttgagggcggatcaatgcaaggggaagcgtggcagagagatctgcttgccatgtccctaacctatatcgcaaagttagcgcatttacagtaaacagccgtgataagacgcggaaagatggtgcttcgtctctcatagaaaagcctgcggagcgagcgggtgtagagtgtgagcacctataggataacgtgagaggggcacgggttgttctaccactataaaatatcgtgcgcgcgcatcgcacgcacgcgagggaaatactccttctgtaaatgcttgtagtataggactgtgcggaggggtgattccgaccagtactggtcggctcagtgagcagtactggtcgcgacatggagtagtactggttactcatactgaccagtactgcttcgattggtgaccagtactggttgcttttcccccttcgcaaaggttgttgctccgcatagggataaaagttgcggacgagtggcagaaaagtttggactacgtacgtggctctaatatctacgtacgtggatctttgggtttgcgtgcctggtctttaagactacgtgcgtagatgcggaaaaaccactacgtgaaggcgcttttttcttcacgagaaggacactttttcctccgctgtataagtggaatactcacgataaggcgaagggcttgctcggtcacttcggagaggtatatcggggagctgggcgtgcgatgccttagcacaattagtagaggacaggactctcggcgacagtctctcgtagaggctccgcgagagcgtgcgtgctgctattgtggcgagggatatgggaagggcttcgccgtaggtgggagcgtggggtttaggaaggggcggtatgtacacctctataattgtgtggtcggggcgatttcgagggttgatttttaggaatatgggaggtggggagttgtgtgagtctgtgtttttgagatctactctttacaggaaagtacgtcaagttgcctcagaaggggctctgatctcagtcaaatgtccataggtttgagtgatttttgcgtgtttaatgatattgtattacttttatgacgcctcatagtgagcctatttgcctataccttgcgccatccacatacacggagtccttcttacgaagggcttagggggcgttttttgtattaggtgcacaccgtcccacccgtgctcaggcagagcgccagcgtggtgggtatgagcgaaagacaacgagtagaataacaatacgatcgaggtcgcatgagattagttacaatgttacttgcgggaggatggttcctaagctccatcgtcaccgcccaggccgcttctcccagcctggccacatcttcgggaggccatgctacgcagcagaacccaacgtcttcgctgaacgtcttcagcggtaccgtatatgatgagaatggcgaccctatgccactcgtcaccgtccagatcttgggtcagactggtggcttcatcacggatagcaaggggcacttcgagttcaagacgaagaatgccaccgagcgcgtacgcgtcaccttcatgggctacaaggctaaggccgtcaccctgcgtggtggtacgcccctgcgtatcgacctcgagccagacaaccagacgatcgaatcagtagtcgtcaccggcttcacgaagaaggataagaagagctatacgggggcacagacgactatcaagtcagagcagctcctctcggtaggtacgaagaatctcctgcagggcctcgaggccttcgtccctggcctgcaggtcgtccagcagaataacctcggctcggaccccaacgcacgccccgacctcaatctccgtggtcgtgctaccttctcaggtgcagctaacctcccgctcttcgtcgtcgacggggcgatcgtggatgtcgagtatatctacgatatggatatgaataccatcgagagcgtcaccgtcctcaaggatgcctcggcctcagcgctctatggtgctaaggctgctgcaggggtcatcgtcatcacgacgaagcctatcagcgagggagctatccgcgtgaactatagcggtaccctgcgtctctcgatgcctgacctcagtgactaccacctcctcacgccccagcagaagctccagtatgaggacttggcagggctctataaggctggtggtgcggcgatggcgacctcctttgacaaccagaactccttagatttgatccgtgaccgcgtcgtgcgtatgatccagagtggtacgaataccgactggctcgctaagcccctgcgcaccggtgtctcacactcccacacggtcagtgccgacgggggggacaagtacgtgcgctacggcctctcgctccgctatggcaatgagacgggggtcatgatgcagtccgcgcgtgagcgtctctcggggaccttcaagctctcctacaaccgacagggtaagttctttgcctcaaatacgctgacggtgaaccgctctacgtcacaggatcccagctacggctccttctcgaacttctcgaagcagaatccctatcagtcgccctatgatgcgaatggtgagctgctcgcaaagcttgagcataatctggataatccgctttacgaagcctcgctcggtagcttcaaccgcgctgggagcatggacttcctgaatacgacgacggcgcagtactggatcgatcgtaacctccgtatcgatggggacttctccttcaccacgcgcaataactactcgcgtagcttcaagtcgcccctctcctacaccttccgtaatgagaccgacctgacgaagaagggctcgatgactgagaaccttggtcgcgggctgagcttcctcggtaagctgatggtgtcctacaatcgtaccttcttcgagaagctctacgtcacgtcgatggcgggctcgagcctcgagtctacgacggcggacaacagtagctataccagcctcggcttctactcggacgtccttgggcaccccaacttcgccctcggctatgggggtagcgcccgtccctcgggttctgagtcgctcgctacggctgctggtttcttcttcaacgggaacgccatctacgacaaccgctattcggtggacgtcgtctaccgctacgaaggctcctcgaagttcggtaagaaccagcgcttcgctcctttctggtcactcggtacggcttggaatatccacaacgagaagttcttcgagggcaataagaatatccagctgctcaagctccgtgcgagtatcgggtatctggggaatatctccttcgacccctatcaggccctcacgacctatacctataataatcgtatcaactatatcgtaggtgctggctccgtgcccttggctatcgggaaccccgagctgaagtgggagcgtacgcttagcaagaacgtcggtcttgacctgacgctcttcaagaaccgctgggacctcaccctcgatgcctaccagaagacgacggacaacctcctgctcgacgtctctcttgctccctcgatcggtgctgtcaccgcccgtcagaatgtaggggaggtcgagaataatggtatcgagttccagacgcgtgtcgtccccatccagacgaaggacctgcagtggtcgctctcgctgaactactcctacaatcgcaataaggtcaagaaggtgagtgatgctctcaaggcactcaaccagaagaacctcggtgtcgactccctcaaccgcggtacgacgcccctgcctctctacgaggaaggtgagtcgcttacggctctgaaggtcgtcccctcagcaggtatcgaccctgctactggtcgtgagatctacatcaagcgtgatggtacctataccttcacctatgatcccaatgaccgtcgcgtcttcggcgacacgtcaccttgggcctatggctcgctcacctcgtacctgatgtacaagggcttctcgctgaatgcaaacttcggctactccctcggtgctacggtctacaacgctacgctcgcctctcgtgtagagggtacaaagaaggagcagaacgctgaccgtcgcgtcctcgagagtcgctggaagcaggctggtgacgtcacccgctatcgtgacattgcctctacggagagcccctatcagacgagccgcttcatccagaaggaatactacttcacgctgcgtagtctctctctggcctatgagaccgaggctacttgggtcaagaagctccacatgcgccgtgcacgcgtcgagctcctcaccaacgacctcttctacctctccacggtcaagcgcgagcgtggtctggactatccctttgctcgcagcgtagagatgtctctgcgtctctccttctaaccctaaatgagaagtgtgtttatgaagaagacagctttatatatagccttcggagcgcttagccttgcggctctgccttcgtgcaataagttcctcgatgtccagcctaagggtaccctcctgcaggaagtccagttctcttcgctccaggggtactatgatgccttctatggtgtctacgggacgatggctaagtcggacctctatgggcagcgtatgacgaacggcttcgtcgacgagctcgctcagatgtttggctctacgagtgcgacctcgacctcagtgaagactcgcgcttacaactacacggacgtgtccgtgaagtccgagatctacagcctgtggctcggtcagtaccaggtcatctcctacgtcaataatatcctggcgaacctcgagtcgccctccttcagcagcagccacctctcccagctcaagggggaggcactcggtctgcgtgccttcctgcactttgacctcgtgcgtctcttcgccgaggactatcagagaggcaaggactcacgcggtatcccttactcgtatgacttcaacctcaagaaccgtacggtctacaccgtcgcagggacctatgagaatatcctcaaggacctcgacgaagctgagcgcctcctctccgatatcgatgagacggtgagcctcgacctttcgcagtctacggacttctggtcacgccgtgctgtacacttcaataagtatgcggtctacgctaccaaggcgcgtgtctatcaggcgatggggaactcggcaaaggccgctgagtatgctaagaaggtcaccgatcatacagcgagctttaagcttgcaggtcgtaactccttcgagtctgtacgtcgcttccctgccacgggcgagctgatcttcgggctctatgcgaatagcttcctcgatgacttcgctaatcgcttcctgaagaatgtcgctggtaccgatgagggtgtccaggcacacagccgaagcgtcctcgatcagctctatgctgtcacgggagcggctgcgggtgctatcgacaatcgtcaggcagccttctaccgcaatgtagatacctaccagcagttcatccgcttcgcgtccagctcggaggaagctacggctgcagcaactgcgcagcgcgggctgaccctgatccgtctgccagagatgtactacatccaggccgaagccctctactcctccgatcctacggcagcgcttgctgctctgaacaaggtgcgcgagagccgtggtctgaacgccctcacctcgagcgacctgcccacgcaggtagacttcaaggcagagcttgtcaaggagtatatgcgtgagatgccaggtgaagggcagatcttccctgcgctgaagcacttcaactcctccttccttgatctcctcgggagcagtacgatccagcccagctccagcatctttgtcctgccctggcctacggatgagctcacctatggtaataagtaaaagcccacgacaatgaacagaagatattcactggcctcgcttgccctggccgctctcggcctcctcagcgcttgctccaagtcggacatctacgacggagagtacagcaaggatggctactacaatgagtctcgtgtgatctacttccctaactcgggggcagataccatcgtcgtacagaacctcgccctccttgaggacaacaatgggaagatccccttgaccttccatgtgaacctcctcgggaagctctcctcgtcacccctgagctataaggtggagcttgataagtctcgctctacggctacgtcgggcgagcagttcgacgcgcttcaggatacctatacgatccccgcagactccatcaagggctccttcaccctgcagctcaatcgctcgaagatctcgaccgtgcagcaggagaacgggaagtacatcgtcacccgtgacggtgtccgcaccctcctggatgccctctcggatatggagcctggtgacgtccccctcctgaagtacgacacgatcacgctgcatctgtctcctacggcagacctgcgtacagcggtcaataaacgcaatacagtcgtcctctgtgtgacgaaccagctcgagatccccttctggtgggccttcctccaggatgtctatctcgggaagtatagtgaggggaagtaccgtatgctcatcaatgcctacggcctccccaagaatggggaagaccccgtgcagcaggcgctatacaagactgatgctaatgtccaatatcccctcctgctccgcctcgagaagtatatggatgagcatggtgaagagaagccagcaattctggtgcgtctcttagctcagtatcgctaacctcacagagtacgaatgaagatgaataagatctataagtcactgggccttctcctggctctctcactcttctcctcctgctacaaggaccactcggtcaatggcgatcaccctctggctgtcgtcaaggtaacagagcccatcgcctcggtgcagacggctaccttcggtgaggtcaccgtgatcaagtcgcctgcatataccatcacgacgggcgcatccgtgacgccctcctacgagtggatcgtcgatggtgtggtcgtctccacagagaaggacctctcctatagccctacgagctatggtaagcatgatgctcgtctgcgtatgtacacgcctgacggctcctacttctaccgcttcactatcgacgtaccctaccgctatgtcgacgggctgtacgtcctggcgagcaacgaagggaagaccatcctctcctacttgcctggcggggagaagacggatgcctttgacctcgacgcctttgggcgaagcaaccccaccatcgatatgacgggggatccccagtcgatggtcttctaccgctatgtgccaggtgcaggtgcatctcgtagctatctcggtatcgccctcggtctccccacacgctactatcgtgtgtcggctgactcgctgaaggtcctcacgcctcgtatctccttcacgaaccccgtagatttcagccacgccagtggcaatcaggctacggtcagggagtacttcatctcgggagctaacgtctgggagatggagaagtcggctactttcccagctaagaagcacgatcgttacctctcgcgtgtcgcctcaggctactcgctcgcctcggctatcgtgaattggcgtgccttgacgggtacacgtatcagtgagggcatggccttcttcgacaatgcgggaagcaacctgctgtatatgacccttggctcaagcgtctcagtaaagaaggtgcgtacctttacggcgagtgccacctctggtgatacttctgaggagaaccccttcaaggatatgacgcttatcgacatgaagagtgctggtgaagggaactatacttataactacaccctgctgctgctcaagcgtaacacggataacaagtacttcgtcgctcgcctcacggctggggacttcgctcagtcgcagaatgtcgatggtgctacggtctccatagttgagttcaccgaaggcacgcctacacatctgcagcctaacctcggtggtacggctgcgctcgtagcgactgcggacaaggtgtacttctacaatatggcgaacgccacggcgacgacccacccagcttggatctcgctccccgcagggcagacgattgcttcgatggctctgacgtcggacaaccgcctcttcatcggggctaacggtacaggcacaggcttggttggctcgatctacagctacaatgtagcgggcattacccccgtcctcctcaagtctgaggaaggtatcacgggtaagatcaagcagatcgtctaccgtcagttcaacaactaacatcatgcctcctccccgcaccataccctgcggggaggaggctcgctcctccgtcgccccagtagcctcttcctccacggataaggctgcggggcttcggtcgtcctttgcggcttagctgagagaagggcgcacgggaggagcaggaggcccttcagcctcaccctccactgaatcaagtatcacactataatccccatccatgcacaagagttgtatccgatgcctgctcgtggctactgccatctctgcgggctccctcagcctcgctgcggctccctcagctctctcttctcgcgccttcggtgacgacaccaagaaggagaagaagaaagaagaagacaagtacacgaagttcttcaaggacaagaaggtcgagaccgcccgcgggaagttcgttaccctccacaagatcgatggtagcgtctacctcgagctccccacgaagtacctcggcaaggagctgatgatgggtgccaaggtcacctcgaccaccgaccccgattatctggctgtcggctcgatgaactccgctcctatcgtcttccgcttcgagaagcaggacagcgtcatcgtcatgaaggcacccaactccatcgtctatcgccgtgacgcttcgcccgagctgcagaaggccctcgagctgaactaccgcgaccagtcggtcgagtccttcacccccgaggcgtacaaggctgatagctccgctgtcgtcctgaagatcaattcgctcgtcacggagtccagccccttcttcgagatcgtcccctcgcagcagggtcccttcaagatcacctcttcgcgcaatagcaacctgaccttcgtcagggggctgaagtccttcgactccaacgccagcgtccgtgtcgagatgaacttctctgtgaacgcttcgctcatgggtgtactcaccgtggctaaggatatgcctctgacggctgaggtgacctatacgatcctccccgtagaagcctccaacgccatcccccgcttcgctgatgcccgcgtaggctatcagacgacgcgcaaggtctccttccccgactacctcgaccagagtgagcccgtctatctggcacaccgctggcagctcgtccccaaggataagaaggcctacgctaagggtcagctcactgagcccgagaagaagattgtcttctatctggatagcgccttccccgccagctggcagcgccccatccgtgagggtgtccttcgctggaacaaggccttcgaagccgctggcttccgcaacgctatcgaggtacgtgacttccccaagaacgataagcagttcgaccccgacaacctcgagtactcttgcatccgctacatccccaatagccaggagacgatagctgcctccaactggacggatccccgcacgggtgagatcttcagcgggaacctcacgatctataataatgtagaggcactcttgcacaagcagcgcttcatcggtacggctgctgtcgacccacaggtgcgctcgtctcgtctgccacaggccctcttcgaagagtcgctctcgcagctcgtcacgcaggagatggggagcgtcctcggtctgctgcacaactacgctgcttcggcatcctacaccacggaccagctccgctcggctaagttcacgaaggagtcggggctcgcaccctctatcctcgacggtgtgacctacaactacctcgctcagccctctgacaagggggtacgcctcatcaacgaccagctcggtgtctacgacctcttcgctatcgactggggctaccgctacttcgacctcaagggcgatcccgctgctgaggctaaggaactgctgagccgcgtcgacaagcgtgctcgcgagccttacctccgctatgctcctgagcagcgctacgctgtcgaccccaccgtccgtaccgaagacctcggtaacgatcctatcaagacggccgagcttacgatgaagaaccttgccttcatccagtcgaacctctctaagtggatcaccaacgaccccgacagccgcaagaagaagagtctctatctggctgtcgtacagggctactacctccagctcaagaatgctatgagcctcgtcggtggtgtcgtctgtcaggagagccgtctctcgacgagcctgccccgctatcaggtcgtgcctaaggcgaagcagcgcgaagccttccagtggctcctccgtcaggcaaaggacttccagggcaaggctgaccgcaacttcgagcgtaagggcttcatcgacgtgagctactacgaccagctcctcgagttcctcgtcaaggatatctatgacctgcgctcacgtatcatcatcgcctcgcaggtagactcgaagacgtatagcctcggcgaatacttcgacgacctctatcaggctaccttcgcctcgaccatcgctggcaagagccccaaccacatggagcgtctgatgcagatcgccttcatcgacaagtctgtcgctggtacggtcaatccccgcaacgctacgcctggtatgccttacagctttgccggtgcacccgcctctgtcggtggcaagctcatcagcctcgcctctacgacggactacagcgatgccctcaagtctggccgcgtcaactatggtggtggcgacccctcggcaagcatctatcctatggccaacgtccctgccctcgacacgtcagagcagtatatgtacgctgccctgctgaaggtacgccctctgctcgagcagcgcgctgcctccacgacggaccgcacgctcaaggcccactaccagaccttggccttcaaggtcgcgaagctcctcgatgctaagaaatagactacccgaagatgatcaatagaaagatagcactcctcctggctgcagcgaccctcacgctggctcctgctacagcccatgcggggatcttcgacttcctcaagcggaagaagaagcccaagacggagaaggcacccgagaagagtgcctacgagaagatcctcactgataagcccatcgtctctgctaagggcgacttcctcaccctgcacaagacggacaataagctctatgtcgagctccctgtcaagaccatcggcaaggaaatcctcgtcgccgtcaccctctcctccatctccaatcctcagctcgggatggtcggcttcaagaactccaaccccgtgcatatgcgcttcgctcagcgtgacagcgctatcgtgctcgaggcggtgaactccgacccctacctcacggggcagctggagaaggagcttcgtccgaccttcgctcccagctacacggacctcgccctctataagttccccatcaaggcgtggaacaaggataagtccgccgtcgtcttcgacatcacctcgctcgtcacgaaggatcagaagtacttcccgctgatcgggaagagcctcggctcctatcaggtgcagtcaagcctgcagagtgacctcggctacatccgcgagatcaaggccttcgaggacaacgtctccatcaagatcgaccgcagctaccgcatcaccctcaactcctcgcgtgggggcaagagcccgctgaaggactaccccgtgactctcggggcgaccttcaccatcctccgcctgcccgaggagccgatgacgccccgtctggctgatacgcgtataggtgtcttccacatctcgaagaatgcctacgaccccgagtccaagcagatcgaggccgtgcgcttcgctaagcgctggcgcctcgagccctcggatgtagctgcctacaaggctggtcagctcgttcgccccaagaagcccatcgtcttctatgtcgagaataccttccccgcagtgtggaaggctgcgatgaaggagggtacgctgcgctggaataaggctttcgaggctatcggcttcaaggacgctatcgaggtgcgtgacttccccacggatgatcccaatttcgaccccgacaacctcaagtacaactgtatccgctacgtgcccatcgctacggagaacgctatgggtcccagctgggctgacccccgcacgggtgagatcatcaatgcctcggtacttgtctggagtgatgtctcgaagctgaacaacaactggcgcttcatccagacggctcaggtcgaccctctcgtccgagcgatgaagctccccgatacgctgatggtcaagtcgctcaagtacgtcatcgcacacgagatcggccataccctcggcttcatgcacaacatggctgcatcggctgcatacactatcgactcgctccgctcgccctccttcacggcagtgcacggtacgacgccctcgatcatggactatgcgcgcttcaactatgttgcccagcccgaagaccgtgctgtgagccttgaccctcccaccgtcggtacgtacgataagtatgccgtcgactggacctaccgctacttccccgacagcaagggtaatcccatcgaggaagctcgctatctcaatgagcttatcgagaagcatgctgctgatcccgagtaccgctatggcgtacagcaggtcggcgattaccgctacgacccctcttctatcgaggaagacctgtcgaatgaccccgtagctgccagcaccctcgggctgaagaacctcaagtacatcatcgctcatctgggtgagtggttcccacgcgacgaggaagctcagcatcgtgctacgctctacgaaggtatctccgatcaggccctgcgctacgtgtcgaatgtcttcctcaacgtccctggtatctacctctatcagacaagcgaagcctctggcctccctcgctacaaggtcgtacctaaggctcagcagaaggcttcggctatgtggctcctcgaccaggcgctttctatcgacagcctgcgcaacgatgcgctcgaggctacgatgggtgatctgggaggctcgtcaccctacgtcgtcgtcggtgcgatgacgcgtgctatggcgatccgcaatatcaacaacctctgcatgagctactacctcgactcgacgtcttactctcctatggagtatgccgatgatgtctatgctcgtgtctttgcgaagaccgaggctggccgcgaggatctcactgccgcagagaagcatctgcaggagctctacgtccgctacatcacctcttatacggaggagcttgtagcgaagaccacgggccgctctgctctgacgatcgctgagcttacgggccttgccaaggctggtgagcctgtccgtactgagggtatgagcgatgaggagttcatcgcgctcctgcctaagctccgcggctcgcacttctgctcgctggatcacgaccattcggatgatccgctcacgaagcttgatgctgtcggttacctcaacttcgggaatagctacggtgagcctgctgacctcttcacctctgcgatcaacatgacgggcgacctctatctgcccctgcagtatcgcactgaagagctgctgaagaaggccctcgcctctacgaagagcgaaagcctgcgcatgcactaccagacgctcctgcgcaagctcgagaagatcacgaagtaggcctctcgactgctcctttacctaaagtcctcccctcatctctcttgaagagtgaggggaggacttgttttgtaaactcggctaactttgtatctatgaaacgtctcttcctctccctcttggcgtgccttatgtttgcctgtctggccgaggcgcagcgcacgcacgacaccatttacctcaagaatggctcgatcctttatggccagatcatcgaggaactccccgatacgcaggtgaagattcgcctccgtgatggctccctcctcatctgtccctattccgacttagagcgcatcgagtactccacggggcgagcttccttctatgacgagccgcgtgagccttatcttaactggcatcttgatgcggggtaccttttcgggccttctgagcgccagcatataggggcgtttgtgagctacggggctcgcttcagccgagctctcttccttggcctcgggtcaggcgtcatgtgtgatagggctgagtcggcagatctggtgatccccatctatgggcatctgcgtgcttacctccccatccgtggtccgatcaagccctttgtagacctgcgtcctggctatggcttcactctggtgaatagagtctcaggcttctacggctctgccgtggtagggcttgatctctggcgctttacttgtggcgtcggggtcagcacggtgcgcaattcctccagtggcgatcctctgctcgaccgagagcctattccttacagagcgacgggcttcaccctgcgtatcggtatgaccttgtagcgaggaggcggacgaagccctcccctatacagcctcccgccctgatgagcttcagttcatcagggcgggagtctttgttgtgtcccatcatattggggtcacttgctctccgactcttgtatgtctcgtcgtcgatacatttggttggggtggttcttttggggaaagcgtttgcaaaggtcttcgctcagtttagggaggatgaaggtgcccagatattcctttgtccgctccatatagttagctatctgctccaggctacgccactgacagcagtattccagtatcaatagacgcatcttgccaaagggcatcttagagggctttctgctcttcgaggttcctatattagcaggtgaggtacccatattagacgatgaggtacccatattagacgatgaggtacccatattagacgatgagctatccgtatttgctccagagctgtccatattcgggtgtagcgcatcaatctcttctatcgaatatgtatcaggatttagagtgtaggtcgtccctctaccatgtccttgggaaaagaggtagccttccctgaccagatgctgtaggcggtgcgtaatgtcagctggatgcagggtagaagaggcgcggacacattggtggttgatgatcttctctgtgtaggcggtagataggatcgttcgctcctcttgatccagctgataccagcgctcttcccccagctgggcacggagtgcacactcgatacgctcgtccagtagagactccaggggcataagtagtatgatcttattgggctctgtctcttcatgaggggaaggtgccttccagccgatgctcctccagcctaagaagatcttgcccgtaccgctacctgctcgctctgcagcaccgatcctcatgaacatcttttgtaggctggggtttcggcagacgctctctccaccttcgtagtactggcttcgggagatgagtagggtgcctggattagagaagacgatgcgatcggggtagcgtaagatcttcagggacgtactctccccatagtcagcgtggacacagctgttcacaaaggcctcgcgaagggctatgtgtgctggggtctcatcctttcgctgattaccctccagttcgaatgggcttgggagtacctcctggagcttgggtaagacgcggcgatagaattggaagaggttagcctcccatttgccatcgggatagatgcggtctacccagcgttggtcgctgtcctctcctggtatagagcggtagtcggggaagtaatgtggggtacattgagggtcttgtatggagtcgatctttccgaacataagcaatccagccagcgtgaagccttcgtccccgctttctctatctactcgatagcctccgagcttcttcatcaagctttggtcatcctcggagtgccaaatgtggctggggtcactcaggctgaaaagtctacgatattgtgcgagcgaagggaggtcaatatcatcccaagtaaagcccttgaggatacggctatcggcggggtgagcgaggtcagagtctgcatacatacgacgtacctctgcaggggtgcagtggtagtcgccttcgccattcctgcggtagctcccctgctcagggtccctccctatatagatcgggcgctggctacgggaagctggaggcacctgaataaatagcagatagttcccctcaatgctttcgatgcttacatccttgtcggtaagtaggcaggcgctgactttttgcctgttgctgagctgtcggaagagttcgtctttcatctgctccacctgctcttcggtgagccctgcgagactgagtgctttgcttggaggctcctccttgatccccagcacgatgagtccgccgtgggtattggcaaaagcggagtatgtctcccatagagacttgggtaagccgcctttggccgccttgaattcgaggtattcagactctcgctcgttgagtagattattgataagctcttgcgtgttagtcgtcgtgttcattgccttgctggtattgggggcttgaggcccgagtgtcaagagatagaggtaatgtgatataaaggtacagactaattgtgggatgctccgctgggcgatgcaccatccactatttataataggtgcgcaggagtaggcgaagtcgtgcttagctcgcgggtatttattgccttcccgtagtggaagagttgggtctacgtgcgtagtccttagatctacgtacgtagtctttaggatttacgtgcggggatataaagacttggtacgtggataggggagttagcgtagtggtgtagaggtttttcggtgggtgcttgcactttctctggtgctgggtggagattttttcttcggatatttagagcttagacagctgctggatggtgggtgtttttatgaggatatgaccgattcccttgagtagctttgtgcttattttttcgggagcttagggcttgcctttttgttggctatgctgtgtgtttatgcaataatagatagaaattatgtataagtccgggtatttttacgtttctttgttggtgccttcatcctttcgcttgctcttggaggagcaacggatgagggatggaggagcgactcactgtacgctttactttatataaaagacagaatgaatattagaagtcaggtagacggacgtctgccctatacggcaccttctgccgagctgtttgctctcgcagctgcgaaccccagcctgctggtgagctttagcgccaatatcgatgaggactttgatgacggcacttgggccactgaggaggttgctgatgataactctctttagccaggatacagctatgatgaagaaactattccttgcagcacagctgctcttaggccttggcctctcttcgtgtggacaggaagataccccaatcacccatcagcgagctacgacggcggagcgtatcacgctctctgtggactttgcttcggaggagtctaatgcccgtgcaatgaccgtcacctctggaggctctatcttgcagaagaaaacaaatattggttggtcagactataactatgtacgttatcgctttctccggaagcagacttcgaaggcggtcttttccgccgaagctacggagcctgtgaccctcgtcttctatcacggcggtaaagcctatcctgtagagagccaaatcagtctcaagaatgtcaacggacactaccgtggcgatatcgaggcgacactccctgctgctctctcgggtgtcacgcgctcagatattgaggtcgctggggtgcttggggcgacgagtgtcgatgctacgacggggaagatcaccgtcacagctccgcccgccatcgtcgaaggcgaggagatgcagacgatgccgatgtacttccctaagacggctcttagtgcaagctctacccacctggcggggctgcgcttcaagttcctcggtgtgctggtcgtgatgcctgtcgtcgtgaaggctgaatggaccgaacatcgatcttcggtaagggttgaggatcaggtctttactcccgaagtctttacctttggacccaatcgcttaacggagtctcaagtcgaggtggacctctctcagggtggggcgcccacgctgacgcgtacgagtagctcgacctatgtgcatcctctacgtaagactgaggtgatctctggcgacgggtcgaagactcacattctctatgtctttcctgtacgtcttgatacctatgctggtatgcagcctacgttgtatgggcggtattatccgaagattggagctcgtcagtatgaccagagccgtgcaaaggagtttgtcattcctcgttaccctactactgtagaagggattccccagggttctcgctctatcgtgtatgatatgacgatagccttctataatggcgatagcggcattgggatctttaagggggataatcagaagaccgactactccgtcttctcgggccgtgatgtagggaccgatacccctggcagaggctggaattagtatcccatctcaagggcttgcttagccctttcctctccacccctcagatgtgcgatagagcacatctgaggggtgttctttttattggtctcttggtcgttaggctttatttactacctttgctcgtggagtgcaacggagctttctgatacttcgtatatgactgcggaggtgtaggatgccgtggactctacttggaccactaaataaatacggtgcgcccgctatgtgatcacccgattttctccccattgagttatttgcctatggctatttctacctcttttcgcaagccttaccaagccccacgctgtgggcgctattcccttacttcttcgcaagatctcctcgtcgcaggtagccatactggtcgtggcctcgagggcgatgagtatgatgaagacgatctgccctcgctggatctcggcgggtggtaattaataaagtatcccaataacgagtgtgtggctcgccctttagggggcgagtgtcttgtgctttgcgcccctgagaaggcccgcggagctctcagaagaagctgcccccgcagtgtctatcgcatcgcgggggctggctttgatatcctctgtagcatgcttcctaagcacgagagtaggaggtgatgtgtacaggatgctgaggaatatttacaatatacgtgcagagagttgttgtatattgcaaatttttactacctttgtggtcgctaagggtgtcgcttgagacgcttgaggcaacccccacgtatattatagatgtggggaggaccactgaagcgagtttatatatttcgcgataaggtcaagaagattctcgaggcgactcgggatacacgctctcgcatgagagggatccccctccagtgtgatgcacctcttctcccttatatttgactgcttagccggccaatagatatcgggtcggacttggcaaaagccggttgatagggcgaggggaaggggtattcaataaataactaacataagtcataagttttatgcaacagacaaagtcctttgcaggggaacgtgtcccctactcggctccagtatgcgaggtctatcgcctctcgagccttcagaatctcttagtgtcgggtagcgccggtgtggatagcaccctcgaagaaggtgccgacgatctcttcaccgttatttagtccatctgtctatgaagaaaatctttacttattctatcggggcgctcttcctcgcctccgcacttagccttggttcctgtaagagccaggccgacgacgatctgactcgccgtactgagcaaagcatcaatcagggtacgcccgtcgtcttcaccttcgatatggagagccttcccgagcaggacgctcgtgctctcaccatcgagtcgcagacctctaatggccagaatgctggtctgaagcaggtgtgggccgaaggcgatacggagacgatccacctcctcttcaagcagggcacgaagaaggaagtggtcacgaccaagatcaagatcggggcatacaatgcctcctccaagcgctacgaaggtaagttcgaagctacgcctacgacgatcaacctcgcagcaggcaatgtgaccgtcgctggtgtgatgggtgtctctgagcttaaggacacgggtgaagctacgatctcctcgagcaagttcttcggtgaggcagacagcttcacgaccctgcccatgtacttcacggagcgtcctgtgacctccaatggttcgtcctatgtcgcagatatgagcctgcacttcttcggctctgtcgtaggtgtcaccgtctctaacgtcggtggtaacatgacctactcaccacacgaagtcaccttcaagactggggccttcacgaccgagggtacgatgaatatcctcgctgcctccgaagccaatagcgctacgggtgctgctgaggtcctgcccacgtggacgtcgacgcagacggctacgacggagcagcgcgtcgacttcgaccacggtgatatcaaggtcggtacgaagaagaccctcttcttctgggtacacccctcgacctatacgggtaccaagaccctcaagctcgatgtccgtaccgataactttgatgacaacctcggtgctaccgaccctgaagtcacgaagaacttcaatgtcaagcccctctcgcagcgccgcgtgcaccgtatcgctgaggagctcaaggctcctaagggtgacctgatcatctcggaggtgtatatgggcttgctgcctgcgaatacgctttgggagatctataatcctactgaagagactatcgatctcaccccgtacacgatgcagcgcttcgacttgaacggaagctcttatccctctactccaacctatgagtccaagctgacagactcccacctgtggctgaaaacgcttcatggtgctgccacgacgaagctcggccctcacaagacaatcctctactggtctgcttcgacaggctactacagcgaagtggagcagcgtccaggggttgtctatatcgctaactatgccgttacaggagcatttggtctgaataagcagaagaatgactatggtcaggccttccgcgtgcctcagtactcacgtcatgcgctggccaagaatggtaagatcgtggataacttcttctatggcgatggtacgacgaagtataagattcctgcggggaacttcatgcgtaagcctggtcgtaacctgccccgcacgcagatgaagattgatatcaaaaattcagactgggttgtccgtgatagaactgcccgcgaagaccttggctatcgctacagctactactatgatcgtagccgtaaggatgacgacaacttctatggtaaccactggttggaagatactcagaataagggtacaggggatcttaaaggtaaccccatcaagaatgtggactacacagttgatgctacccgttctacttcggatgcttcaacgaagggcaaatacacacctcccacgtggtggacgaaggcacgcgctcaggctgccgataagtagtcatctaccctccctctctcaggctgcggcctgatatgccagcccccgaggtgccacgcatggcgcttcgggggctggtcgttttataccccttccttcggtgaaggtccaccgtacggtgggtagacgcggggggctggggaggcctgtagcgtagcgctctcgggcgcttttcgttatctttgtgtgaagcaaccctttagcagatatgttctcattctccatcaaaaagatcgtccaagggcaggcgttccgtgtgctcttggccttcgctctcctggccttcgtcatcatgctcctggcgccccgcaataggagcttccagtatgccttcagcgaaggtaagccttggtcgtacgacctcatcacggcgccgtacgacttccccatctacaagtccgccgagcagctgcgtatggagcaggacagcatccgtcaggagacgctgcccgtctatacgtacaactccgagctcctgcctcgcaagctcaatcagctacacgacgactacgagcggagcttcagcaagacgctgccacgcgagtactacaacttcctcaaggaagagctgcgtcagtactacacgcgagggatgatgcaggctacggcactctcttcgctcaaggatgaggggcatctggagatcaacctactcggagcggacaatgtgctctcgcgtacgcctatcacgaccttctatagcctgaaggaagtgtatgatatgatcttcgctcatgcggagaaggcggggctgcagcgctcggagctgcagaagctcagcgtcgcctcttacctcgaggacaacgtgcgctacgacaaggagtacacggcgaaggtgctggatgatgccttgtccagtctctcggcctctacggggatggtgcagcagggtgagcgtatcatcgaccgtggggagatcgtcacgccacatatctataatatcctgcgctcgtacaacatcgagcaggtcaatcgcctcggcggagatactgcctcgatcatcaacgtcgggctcttcctctatctgctactgctcttctcgatcctcggcgtctatatcatcctcttctgccagcccttcctccagcagccgcgcaatcttgtgctgctccttacgctgctctttgccttcgtcgcgatgacggagctgcaggcccgcacggagttcttccccatccaggtgatcccgtatgtgatgcttctcatcctgctgcgtgcgttcttcgggagccatctggcgctgaatacctatctcttcacgatccttgcctcagcgtacttcgtgccttcggagccgctgtccttcatcttcatccagctctcggcgggcttcacggcgctcttctcactgcagagcttgacgtcgcgcgggcagatcatacgtgccgccttcctcgtcttcctcgtctatatcggcgcctcgatgatcgtcgagtgggggcacgaaggagctatctcacgcggctactggatccagctcttcctctacggagtgaacctcatcttcctgatgttctcctatatcttcgccttcatcgtcgagcgtatcttcggctatgtgtcgagcgtgcgtctggtcgagctgagtgatacgaatatgccgctgctgcaggagctgtcggagatcgcaccagggaccttccagcactcgtaccaagtctctatcctcgctacggctgcagctacgaagatcggtgcagatgcccagctcatccgtacaggggcgctctaccacgatatcgggaagatgctccaccctgagttcttcacggagaattcggctgcgaacaatccccacaagtacctcacctaccacgagagtgcgcgcgccatcatccgtcacgtcctcgacgggatcacgctggcgcagaagcacagcctgcccgatcccgtcattgagttcatccgcacgcaccacgggcgcagcaccacacgctacttctacaattcgtattcgaacgagcatcccgacgaggtcgtcgacccagagcccttcacctatcccgggcctaacccctacaccaaggagcaggggatccttatgctcgccgacagtgtagaggccgccagccgcagtctcggcgagtacaccgaggagggcatccgcagtctcatcgctaagatcgtcgatggtatcgtcgccgaagggctgctgaacgatacgccgctcaccttccacgatatacaggagatcaaggaagtcttctacctcaagctcaagacgatgtatcacgcgcgcatcgcttaccccgacaagaagtagcatgcacgcccccatcttcctcgtcggcttcatgggctcgggtaagagtaccatcggacgccatctggccgaagccctcgggcggcgcttcatcgatacggatgtcttcgtcgagacgcgcttccgccagcgcatcacggatatgttcgccgagcacggcgaagcggtcttccgtcgtcgtgagcgtatggctatcgaggagctgatgagtatgcccgataccgtcttcgctacgggaggcgggctaccgtgctataccgacacgatggatcacctactggaggcggggcacgtcatctacctgcgctgctctacgcccatcctcacggcgcgcctcgagctgtgcaagcgcacacgcccgacgatacgcgataagagtggggaagagctccttgccttcgtgcaggacaccctcgctgtgcgcgagcctatctatagccgtgcgcaccgtatctgcgagatcgaccacgtggacacgccgcagaaggagcaactctttgccctcgagctggcgaaggaactcgcacgctaagctcgcataagcatacagctacgccccaccgacagcacttgtctgtcggtggggcgtgcttatttgtcggctcccttctgcgcttcgctctggtagcgggtcgtagggtagtggggtagaagcaatagttgttcgcaggcaaagcactataggagattgttgcgggagagtcctgtcctctatttagcgtgctaaggcatcgcacgctcagctccccgatacacctctccgaagtgacacgcaagcccttcgccttatcgcaagtattcctcttatccagcggagggaaaagtatcgttctcgtgaagaaaaaagcgccttcccgtagtggtattcttctatctatgcacgtagtctttaagaccaggcacctcaatccaaatatccacgcacgtagctattagatccacgtacgtagtccaaacttatctgccactcgtccacaacttttatacctacgcggagcaaccacccaatataggtcagtggggcgaccagtattggtcgacgcgctgaccactataggttactactacgaacctatagtggttgactcgtgaaccactattggtttgcaccccacaccaatagtcgtttgagcgtagacgagtattggtttcggccacctccctatagtacttcatctgtgaggtgctataaatacccgcctcacctatcgctgtgagcgcattgagcgtgaggacaaaggtgctctccagagtgtggcatcttgccataggaatcgcttacggctggtagccacttcctcgatctaccctcggcttctgatgcagttgtcttgtcgttttctgcagattcgtttggtggaaacggaaattaggtgtatctttgcaagcgaaatctttagagagtcctctcgagaagtgaatggctccgtagctcaactgaatagagcatctgactacggatcagaaggttacaggtttgaatcctgtcggggtcacaacggagagatgaggcaatactactaaaggacggaatggctccgtagctcaactgaatagagcatctgactacggatcagaaggttacaggtttgaatcctgtcggggtcaccacaagaagaagcgccgtactaccacgaggtagtacggcgctttcgctttgtaggcccgctccacctatgcggtggggcgggtcttttcgtataggtcgggcaggcagatctccagtaggtcgaggacgtgctcgaagccttctgccccaccgtagtagggatcggggacgtggtcgcgtgggctacgctcgctccactcggggaggaggctgaccttgcgtgccagctcttcggtgggcgccagctccaagagacgagagcgattcgcttcgtccataccgatgatatagtcgaagtggaagaagtcctcgtaggtgatggggcgggagcgactctcgagggagtagccccgacgggcggcgtgggcacgcatacgtccgtcggggagctcgccttcgtggtgagcgatgagacccgcggagtcgatctcgtagtcgccttcggcgccctgactcgctacgtagtggcggaagagtccttcggctgatgggctgcggcagatgttgccgaggcagacgaagaggacgcgtacagggcgggagggctgtggactcacgtggggcatactactcgatgcttaggtcgccgagggtgacgcgcccaccctgaccgacgatcgcctcagcgacgaagcggatgcgtgagcccgaggtacctgcggggagcaggacttcctgggggatggggttattctggatgttgtcgaagttgcccgaagcgaccttctgcccgtcgacgtagatgctgtaggagcgcacgtggcccgaggcatcacgctgctgcgaaggcgtgtagatgagcttctggatgggacgtgcgtcctcgaagagcagctcgagtgaagtctgcccagcttcgagcgtgaccgtcgtgtagccgttgccgtcgagcagtgccttgcggtcatcggcgcccagcgaaggtgtctggatctgtgaggcagcgaagccgaggcgcttggtcgtctcggggcgatccttattggtcgacgtggagacgcgggcgcggatcgtagcgtggtcatcgctgagggtgaagggacccttatagcgctgccagcccttggggtgcttggtcttggcatcctcgatagcgtactcgatgacgacgtcgggggtgacggaggtgatgtgcacctggtcgctctcgtcacgacggatcgtgggagcctcgagcacctcgggggtgaggtaagctgcgatctcggcgatacagacggggccacgtgcctcctcgaaggtgacgcgcaggctcttcgtctctacgggagcgaagcggatgatacgcttgtagccgatggtcgtcaggctatcggaggtcgctacgggctcgaagacaccagggctcgtctccgtctcgatgcggaagcgcttgacacgctgtccgagggcgatgtactcctgcaggacaagggtattgaggcgcgtggggcgagagaagcggtagaagaggtagccgctcgtcacgccgtcagccatagcccagtaggtcttcgtcttgccgtcgttggagaggtcgggggcgaacttcttatcaccgctacggaggttcgatgcggtgacagcgacgccacggagcttgttgtcacggaaggcctccttcagatggtcgtgccaagcgatgaggcgcgtagagtcctcggcggggatgcggccgtgtaggtcgatggggcagttcaggaggagattggcattgcgtccgacgctctggtagtagaggcggacgaggttagccacggagcggacctgatggtcttcgcgggggtggtagaaccatcctgggcggatgctcacgtcgacttcgccagggagccactgcttagcgtcctccataccccactgagcttcgctgtagtgcttagccttgtcctcgtcgtacatggcccagttggtctcgccagcccagccctgctcgttgccgatccagcggatcgtgggcacggtaccgccgaagatcatgatgtccttattgttcttacggagcatcttcgaggcggcctcatagcggtagtagctcttggggtcgatctgacgcgtggagtctgcgccgccgtaccagccgttaccgccgttggcgccgtcgaaccagtattcgaagagcttgccatactgcgtcgtgagctccttgatctgctcgtggaagatcttctgatactcgggctgaccgtagtactggctattgcggtcccatggggagaggtagagaccgaagagcaggccgtgcttgcggcacgactcgctgagctcgcggacgaggtcgccctgcccatccttccaagggctgttcttcaccgagtactcggtggtcttcgtgggccagaggcagaagccgtcgtggtgcttggcggtgaggatgacccccttcatgccggcgcgcttgagcgtgcgtacccactgctcggtgtcgaggcgctcgggggcgaaggtcttagcgggggtgttgccatagccccactcgaggtcgttgaaggtgttgaggccgaagtgcacgaaggcgtaagtctccagctcctgccactcgatctgggcgcgtgtagggacggggtggactggggcgggtgctttgctctgtgccgtgcccccaatggggaggctgagggcgaggagtagcgatgcgatcccagcggttagcttcttcataaagggtaggatgggtggattagtatttgtatttgcgctgattctctgcactgaggagtgccgagggctcagctatcgtcttgtcaagtagggtgctgagggccgtgacgaaggccgtactgctattgaggcaggggatgtaggtgaagctcttgcctcctgcctcgaggaagtccgcacggccctgatcgtcgatctcctggatcgtctccaggcagtcgcagacgaagccgggacagaccacggcgatgcgctcggctccttcgcgggcgaactccttcacacggcgtgccatatacggctggagccagtcgtggaagcccaagcgggactgatagaccagctcgacgcgctcaggctcaaggccgaggtcctcagcgaggtagcgtctggtctcctcgcactgcaggcggtagcagtcctcctcgccgtggcgctcatgccaagtgcggcggtcagcgcagtgggcggagtggccgttgtgctcacggcacgccttcgggatgtgagagagtggtatgccgtgcatcgagatgatgaggcggtcgaagggctccgagagatactcgcggacgctatcggctaaggccgtacggtaggccgtctccccgtagaagggagcttgcagacgcaggcgcatagggcgcagaccgaggcgacggatctcctcaagggcgaaggccacggcggtctcatagctgctgcgcgcatagtgggggtagagtgggacgatgacgatctcctcgatgtcggggagggcggccaaggcctctaaggcttcgcccgtaccagggtggccatagcgcatccctactgccacgggctcacggcgtagctcggcgagctgctgggctatcgaggcggagtgggagatgagtgggaagttctgcgcatcggcatcccatatcgtgcggtagtgcgcagcggacttcggagcgcgacggggcacgacgaggtgatggacgaggaagtagcgcagcggatagctgatcccgatgatgcggcggtccatgaggaaggtgcgcaagtagtcgcgcacgtcagggacggacggggagttgggggaacctaagttcaggaggagcgtggcgcgcccagcggggaactccgccccgaagaggcaggggcgtgtcgtcctcatctcttgggggctgaggggaaagacgtactatgcttcatcgccttcggccagagtgtaatcctgaaagaggaagtcgttgtaggggaagcgctgcacgtggatctcacgggcgcggtcgtagaggagctgcttcagctcttcgatcccctcgcctgtgcgggcggagatgaagcagcagccctgctcaccgagcttcgccatccacgtctgctggagctcttcgcggctgatattgcgacgggtgcgctcgccgaggtcgtcggcatcacgctcctcgaaggtgaaggcatcgatcttattgaagacgaggatcgtcggctggtcgatgcctgcgttgatctctcgcagcgtcgaggagacgacctcgatatgctcctcgaagttggggtgggcgatgtccaccacgtgtaggaggatgtccgcctcacgcacctcgtcgagcgtgctcttgaaggactcgatgagctccgtgggaagcttgcggatgaagcccacggtgtcggagaggaggaaggggaggttgtggacgatgaccttgcggacggtcgtgtcgagcgtagcgaagagcttattctcagcgaagacctcgctcttcgacagcacgttcatcagcgtggacttccctacgttggtatagccgacgagggcgacgcgtacgagcttgccacggttcttgcgctgcatcgacatctggcgatcgatgacttttagctcggccttgaggtgggcgatacggtcttggataatacggcggtcggtctcgagctgcgtctccccaggaccacgcatccccacacccccacgctggcgctcgaggtgcgtccacaggcgggtcagtcgggggagcatatagcgatactgagccagctcgacctgcgtcttagcgtaggccgtggtagctcgggaggcaaagatatcgaggatgaggctggtgcggtcaaggatcttgaccttcagagcctgctcaatgttgcgaagctgcttggggctgagctcgtcgtcgaagatcacgataccgatctcattctcctcgacgaagaggcggatttcctccagcttacccttaccgacgaaggtgacggagtggggctgatcgaggcgctgggtgaagcgacgtacggctcgcacaccagctgtggaggagaggaagtccagctcgtcgagatattcgcgtgcctgctcctcgttttggttcttagtgatgagcccgacgaggaccgcttcctcgctcttggcttcagtgatgataaactctctcatactctacaaaaatacgataatatataaggagttcgcccagcgctacatcgccgtgaccgaaagctcggtgctgggcgctctacgaccgctcgttctttactccctgctctatgcgggcgacacctcgtgaagcgtgtgtgcttccctccacaagaaagatccttcgttagcgcaagaaaaagggcggcctgaggtgagaaaaacgtgccaaatcattggcaatagtttgatccacgtacctggtcttatcatctacgtacgtagtccataggatcatcgtgcgtagaccttagatccacgtacgtagaccaaggaatagctcgcttgtttgggagcaatagcactacagcttgggagcttttgctccggctcttcgagcgaatgcttgtagtgaaacggacagcgcccgcaccgagccattgactcggtgcgggcgctgtgatagggtggagtgggagacgtttacttcttcgacttgaggtgagcggtgaagcgcttagcgttgtccgtggggttgaaggtcatcgtgccagcctggatatcgacggcagcgtcggcctcgaggcggttgatgatggtctcgacctcggtgcccttgatgctgcgcgctacgtcggaggtgtaggtagggcggttgaggtggacgacaccattgcggtagacgtagctcgtagacatcgtagccgagagctcgcgcttcttggtctgagagcccccatcctggatgttctgggtgaacttaccatagccgacctcgatcgaggcctgacccttgcggatgaaggagatggtgacgtcgatcgtcgtcgtggtgccacccgaggtggtcgtgaggttggggatagtccacaccgtgccagtgagggcatccgtttcaggctctgaggagcaggccgtgaggccgagaatcgccccgaaggcgaggagtaaaagagtggtgaatcgcttcatctgtggtttactattatgtattgtctgtggttgcaaagatagggcaccgcaagcgaatgcccgagtgactactcttctaacgcttgattataagggaattgcatatagtgggcgatagtgtgaattgtaaaaaagtagagcgcgagacctgcgggagtaccacgatagagaaaatcggttaactttgcatcgtccctatgtacgctaactcgcttaatagtatagttaaattatgaatctcaagtactcgctgctggtcttagcagggatctcttccctggccgcacaggctcagacctcgcagcccacaacgatcgaagctcccgctcaccgtgtagctttcgctcacgagcccggagctaactacttcatctcgctcgccggtggtgtaggcgccatgttcctcgaaggaaataacacgcccaagttcaccgaccgtctctcttggacggcagccctctctctcggtaagtggcacaacccttactatgctacccgtctgaaggtcgtcggtggtgaagcttacacctacagcaagctcaactctgcgcttcgcaacgacaactacttcgtcggtggtcactatgacttcatgttcgatgtagtgaacttcttctctacctacaaccccaaccgcgtattccacatcattccttacgtaggggtaggctatgagtacaagttcaaccacacggtagcaggtctgcccaacacgcacgctgctacggctaatggtggtctccagctgtccttccacgtcgctccccgcgtcaacatcttcgtcgagggtgaagctacgtacaacggcttccacatccgtaagtcttacgctcctgacttctccaactcgctccgtctgtctgctgtcgcaggtctgaccttcaacgttggtcgtcagggcttcgctcctgttgagcccctcgatcaggcttacatcgatggcctgcagtctcagatcaacgcacttcgtgctgagaacgctgagctcgctaagcgccccgaaaagtgccccgacctggaagtcgcagctcccgccgctaacgaccgcttcgtagctgataagtctatcctcttcgcacagggtcagtctgttgttagcaaggatcagctcatcaccgtcttcgacgctgctgaattcgtcaacaagggcgaaggtgaactcgtcgtcacgggttatgtagctaagaacgaaagccgcttcgcaggtctggccgaaaagcgtgctaaggctgtcgctactctcctgacggagcagtacggcgtatcagctgataagatcaccgtcgaatggaaggatgctggtgaagctccttatagcgctgaccagcaggcctggaaccgcgttgtgatcattcgctctaagtaatcacctctagtcaagacattcaattctaatgaagacgaaaataatgacgcttgcactctgcgctcttgcagccacgagtgccctgcaggctcaggagcccgctcagcagccttctcacaagactgccttcgtcaaggatggtgctgcacactggttcctcgaactcggggacgctgctaccctcagcctcggcggttacaactacgacgtcaagttcggcgatcgcgttagcttcatcaaccctaacctcgctatcggtcgctgggtaactcccgccttcgggatgcgcctccagctccagggtggtaagctctacgactacatctcgaaccctgtccctggtggtccacaccttcgcactgacgtcatctacggctccgctcagtatgacttcatgcttgacgtcatcaactacttcgctccttacaaggaggatcgcttcttccacctcattcccttcgtaggggttggtgtgggttacaagcatcaggcggaactccttggtgtcaaggatgacagccaccgcttcggtcctcaggctgacgctggtcttcagctgaagttccgcctcgctcgcttcgtagacttcaacctcgaaggtaaggtcacggctaccgacctgcgtctcccctctgcgggtgaagctcgtgtagctggtacggcaagcgaaaacttcagcaacgccagcttcatcgctcaggctggtgcttcgctcaccttccacctcggtcgcaaggaattcgaagctatcacgcctaacgatcccgcgctcatcgctgacctcaacggccagatcaacgccctgcgcgctgaaaacgctgagctcgctaagcgccctgtcaactgccctgacgtagaagtccccgtagctgactctaaggtcatcggtaacgtgatctacttccgtatcaacagcgctgtcgtcgacaagaaccagatggtcaacgtctacaatatcgccgaatacgctaagagcaacaccgagacgatcacgctcgttggttatgctgaccgccagactggtaaccctgcttacaacctcgctctctctaagcgtcgtgcagaagctgtcgctgacatcctcgtcaagaagtacggcatctctcgcgatcgtctgaagatcgactggaagggtgacacggtacagccttacaacgaaaacgtttggaaccgtatcgtcctcatgagcgctgagtaatcctcgctcatagctccctaaggtgagccctgtcgctcaccacccaacgcccgccctcggctgaccacagtgtcgccgagggcgggctcttttatgtcgatccgtggggagtgaccctctggggtgggggagtcggcagtgccttcttcgctgcctgcttgcttagttgggggcaatgtcttatctttgcaccgcattctccgcccctgctggggtgggcgagtgattaggctgtctcgtggtgtaatggtagcacaacaggttttggttctgtttgtcaaggttcgaatccttgcgagacaacaagcctcttggtagtgtgatgagaaatatgtatctttgcaccatcaaaaggcaaacggccaagtacggtgtggtagttcagctggttagaatacctgcctgtcacgcagggggtcgcgggttcgagtcccgtccataccgccagaaggagctgtgtccccttctccacgaggaggagtgagcacagcttctcttccgaaaagccaagctcgggatgtagcgcagtccggttagcgcacctgctttgggagcagggggtcccaggttcgaatcctggtatcccgacactagtaaggaggtctgatgtagagcactacgtcagacctccttcgtttatatcatctccgagggggtgggcttcagtgccgatgtcgtacctttacgctacgaggccgtcgcctccatccctctctccaatagactaatgaagcaagaatcacgtatgatcgccaagacactgcaggccctggagcctgtcttggcacaagaactcgaggccctcggggctaccgatatcgagcaggggcgccgtatggtctccttcacaggggataagaaggtgctctaccgtgcgaactatcgtctgcgcacggccctgcgtatcctcctgcctatcgcctccttccgcgccaatgaccccgatgagctctatcgtcagctcaagcgtctggactggagcgagtggatgcaggctggcgacacctttgccttcgacaccgtcgtctactcagagaccttcacccacagcaagtacgttggctaccgcgctaaggatgccctcgtcgacttcttcactgagcgtggggagaagcgccccatggtgcgtctggacaatcctgaccgcctcttccatatccatatctcgcacgacgaggtgacgctggcactcgatagctcgggtgagagcctgcacaagcgtggctggagagcagcacagacggaggctccgctgagcgaagtcctcgccgctggtatcctgcttctggctggctggcagggtgagacggacttcatcgatcccatgtgtggctcggggacgctcctcatcgaggcagccctcatcgcccgtggtatcgccccaggctccttccgtaagagcttcgccttccagcgctgggcggactatgatcccgctctcttcgctgatgtagaggccgagtgtcgtgagctgaagccctttgagcaccatatctatggctcggatagctccatcgaggcggtgaaggtagcacgtcacaacgtccgcacggcaggccttgccgacctcatcaccgtcagccatcgtgctatgcaggattgcccagctcccgaggctcccgccctcatcgtcacgaacccgccctacggcgagcgtctgcgtctgcgcgatggcgaggagctctaccgcatgatcggcgagcgcctcaagcataactatgctggctcgacggcttggatcttggcctacaagctcgagcacttcgataagatcggtctgcgccacagcgaccgcatcaagatgctcaacggctcgctggagtgtgagctgcgtgcttacaccctcttcgctggtaagcgtgaggacttcaagcgtgctggtggcgaaggcgaagaggagcgtgctcctcgtactccacgccccgagcgtgagcgtgggtctcgctccgagaagccccgtcgcttcgatcgtccacgtcgtgaagatcgtcgcgaaggaggccgtcgtgatggtgatcgccccggcttctctgatcgcccacgtcgcgaagatcgtcgcgaaggaggccgtcgtgatggtgatcgccccggcttctctgatcgcccacgtcgcgaagatcgtcgcgaaggaggccgccgtgagggtgatcgcccgagcttctcagatcgtccgcgtcgtgaagatcgccgtgaaggaggccgtcgcgagggtgatcgtccgagcttctcagatcgtccacgtcgtgaagatcgccgtgaaggtagccgtcgtgatggtgatcgtccgagcttctcagatcgcccccgccgcgaagatcgccgtgaaggtagccgtcgtgatggtgatcgtccgagcttctcagatcgcccccgccgcgaagatcgccgtgaaggaggccgtcccgcgaaaaaaaatgaagggggattgtggcctaatgatcgcttccgctaccgcgatgaagagggtcgtgaacatattaggaataagcgctctaagcatatccagaccttctctggaggtggcgatgagtagctactgatagcggagtttgcagccaccacttgggcctggcatttggtagtatcaaattttgttgtacctttgcagtgcaaacaggtcagcccaggtggcggaattggtagacgcgctcgtttcaggtgcgagtgttcaaaagacgtgcaggttcgattcctgtcctgggcacagccttgacgcacagcgtcctcagtttgcaagcttcaaatacgcgggtggtgaaattggtagacacgctactttgagggggtagtgccggttacggcgtgtgagttcaaatctcatcccgcgtacaaagaaagagagtgagactcctcgagaagtaattcttgaggagtctcttcgtttatgcatatatgtcgatacgtattacgatgatcgtctatcctaatgcaaagctcaatcttgggctcttcgtcacggggcgccgctccgatggctatcacctactggagactgcctttctccctatatcgctatgcgacacgctggagctcgagcccactgatgccgctgaagacgaactcatcgtcatgggtggggtagagacgggagccctgcaggacaacctcgtcctacgcgccgtacgcgccctgcgccagttgcgctccttcccctcagtacgcctctgtctcaccaagcagatcccctcgggagcgggcatgggtggcggatcagcggacgcttcctttaccttaactgctatcaatgagctgtgctcgctcggcctctctaccgaggagctggaggccatcgccctcacgctcggcgccgactgccccatcttcgtgcgcaatcagccagccgtagggcgaggcatcggcgaagtgcttacgccccttgctctcgatctcaagggctatcacctcaccatcgtcaagcctcccatccatatctctacggcagaggccttccgtggccttcttccgctcaagcccgtagcgactcctatcgagaagcttgttgctcgccccgtagcagagtggcgtgacagcctcttcaatgacttcgagccaagcctcttccctcatcatcccgtcctctcagagatcaaggacgagctctatgccttgggcgcagactttgccctaatgacgggctcgggtgcagcgctctacgccctgtcacgtcagcccctccagctcgactccctccgccgtgcggactacttcctctacgaggggaagctttaacgatccttcaccaagaccttccttatgacttctacatccattccccagctcctcgtggcagctggctcgtcgggcagtggcaagacgaccttcacgctcggcctactgcgtgcgctcaagcgtcgtggcctcgccgtgcagagcttcaagtgcggccccgactatatcgacccaaagttccaccagctctccagcggtcgcccctctatcaatcttgaccttttcatgatgagccccgagcatgtgcgtgcggtctatgcacgccacacgcaggaggctgatgccgtcgtcctcgagggggtgatggggctgtatgatggctatgtgcgtatgcatggctcgtcggccgaggtcgccaagaccgtgggtatcccgacggtgctgctcgttgacgctcgctcgtctgcctattccgtcggggcactcctctacggcttcaagcacttccgtcaggatacggaggttgtcggagtggtcttcaatcgcgtggcctcggagaatcactaccgcttcctgcgtgaggctgccgaagatgctggggtcattcccctcggctatattccgaagacgaagctcctcgaagtaccatcacgccaccttggcctctcacttcgtgagctgcaggagctggatgcactccccgaagatgtggcagcactcatcgagaagcacgtcgatgtggatcgcctgctcgaggcttgtatgcgccctcgccccgcactccctgcggaggaagcagtgcctacgtccgcccctgggcgtaagatcgccgttgcccgtgacgaagcgttcaacttcatctacgaggagaatatccgcgcactcgctgcacagggcgaagtatccttcttctccccgctcaaggatgaggcacttcccgagtgcgacctcctctacctgcctggtggctatccggagttctacctcagcgagctggctgctgccgagcgctcgcgtagctctatcgctgcctacgccgctgctggcgggcgtgtcttagccgaatgtggggggatgatgtacctctgtcgtgctatccgtgatgaggaggggaaggcctacccgatgtgtggtgtgctggatcaagaggccacgatggagggcatgcgtctgcgcttaggctaccgcaagctccgtcttgggggacgtgaataccgtgggcatgagttccactactcgtccatcgtacctcaggaggtcggcgaagagacggtcggcgagcagctcacggcacgtgacgaagtcgctccgacactcctttatcgccgtggcaatgtgctggcgggctatacccacctctacttcgctgagcaagatcccttcgcgctcttctcctaagctttccatcccctttacgactcctcttcgcttacttctctaagggaggcgggcgaaccaatattgctttgtgggtgaacctatattggtcggcgggcgaaccaatataggttgataccttggacctatatagcttcacccgctgaccaatataggttcatatcacctcttctaatgggagtgtatgcgacttccgatagagtgggggagatccctcgttattcctacgccagtagcggccttagagctgctactggcgtttgtgtgtctatgggagcttgtcgggtggtggaagcttgcgcggagggataggccatgctggggagactacttatggaaagtctgtacatttgtggtgtacttttataaatgtataggcaatgagcaccgcacttcataaagaataccgcccgctgacggctgaagagatcagcgtcctgcgcgagcacgccaactccgccgacgactggagccaggtctgggtcaaggaaggcttcgtcccccgctacatcctcaatacgcacttctcgggctgggtacgcctggggctcttcgagaagacctttgacctacctgggggtatctcaaagcactcaggactctactacacctacctacacaatgtcgaggtcggcgacaactgctgcatcgagcacgtcaataactatatcgccaactataccatcggcgaagagtccttcatcagtaacgtcgataccatcctcgtcgatggcgagacgaccttcggcaatggcgtcgaggtctccgtcctcaatgagacgggcgggcgtgaggtgctgagctacgaccagctctcagcgcacgaagcctacttcatggcgatctaccgccaccgccctgcgctcatctcggagctacgccacctcatctggggctatatcgatggcttgcgctccgcccacggcacgatcggcgcccacgcgcatatcacggatgtggggaatatcacgaatgtgaagatcggcccctacgccagcatcgtcggtacgcgccgcctatacaacgggagtatcaatagcgtgaaggaagcgcccatcagccttggctacagcgtcatctgtacggacttcatcatctcctcaggctcaagtgtgcagagtggcacggcactctcccgctgcttcatcgggcaggcgtgtacgctcgctcatggctattctgcctcggactcactcttcttcagcaactgccacgaggagaatggcgaggcctgtgcgatcttcgctgggcccttcaccgtgacgcaccacaagtccacgctgcttatcgccagccagttctccttcatgaacgctggctcgggctcgaatcagagcaaccacatgtacaagctcgggcccatccatcagggcattatggagcgcggtgcgaagacctcgtccgactcctacatcctctggcccgcacgtatcggtgccttctcgctcgtcatggggcgtcataccacgcaccctgacctatcgaacctccccttctcctacctcatcgagtcgtgcgatacgaccttcctcatccctggggtcaacctcaagagcgtggggacgatccgcgatgcgcagaagtggccacgccgtgatgcccgcaccgacccgcaccgccttgaccagattaactacaacctcctgagcccctataccatccagaagatgctcaacgggcgcacgatcctcaccgagctgaggcgcgtggctggggcgacctccgagatctactcctatcagagtgcgaagatcaaggcttcctcgctccgtaaggggatccacttctacgagctggcgatccataagttcctcggcaactccctcatcaagcgcctcgagggcatagactgcacctctatcgaagtcgtgcgccaagctctacagccccgcacgtccatcggacacggggactgggttgacctctcggggcttatcgcaccgaaggccgaggtcttgcgtatcatcgaggacatcgagatgcgccgcatcgaggctatcagcgagctacagcagcgccttgccgacctgcacctccactactacgagtacgaatggacgtgggcgtatgacaagatccaggagttctatggtattgaccttacggaggtgacggcagagcagatcgccgaactcgtcgagcgctggcgtagctcggtcgtcgagctggaccgtgagctctatgccgacgcgaagaaggaattctccctctcggcgatgacgggcttcggcgccgacggcgatgagcgtgtgcaggcgcaggacttcgaggaggtccgtggcgacttcgacagcaatacctatgtgaagtccatcctccagcatatcgaggagaagagtgctctcggcgaagagctactcggtcgcctcgcaccgctgcgctaaggagacgatacgacgacgccccgcagagcttcggctacggggcggggaaaagacacggagcgaatcattgggggacaatgattcgctccgtgtgctttttgtagtgggagcttacttctcgggctcggtcggggcggtgaagcggccttgccagcgcgagcgctgacgctccatcatcttcgcctcggcaccgttggactcgtccgactgccagaagcgctcccgcccgatgctctcggggaggtaggcttgctgtacgaagtgccctgggtagtcgtgcgagtaccggtagccttcgccatagccgaggtccttcatcagctccgtgggtgcattgcgcaggtggagcggtacggggaggttgcccgtctgcttgacgaaggcgagggcacggttgatcgccatataggcgctattgctcttctcgctacaagctaagtagatgaccgtctcagccaaggggatgcgcccctcgggccagccgatgcgctcgagggtctcggcgcaggaggtggcgagtagtagggcattggggttagcaaggccaatgtcttcggcggcggagatcatcagtcggcgtgcgatgaaggaggggtcttcgccgccctcgatgaggcgtgcgagccaatagatagcggcgtcggggtcacttcctcggatgctcttgatgagtgccgaagcgatgtcgtagtggagttcaccgcccttgtcgaaggccaagggattcgtctgcacacgctggctgaccagttcgtccgtgaccagaagtgggtcggaggtcgttgatagggcgaccagctcgaggatattcagcgcacggcgtgcgtcaccaccagcgtagcgtaggagtgccgcagtctcggtgagctcgatgcggcgctgggagaggagttcgtcggtcgtgatggcgtgctgcaggaggccgatgatctcctcgctggagaggggattaagcgtatagacctgacagcgggagaggagcggacggatgacctcgaagctggggttctccgtcgtggcgccgatgagcgtgacgataccttgctccacggccgccaggagggagtcctgctggctcttgctgaagcgatggatttcgtcgatgaagaggatggggcgtaccgacgagccgaagatcccgctctgctcactctggatgcgctccagcacctcgcgcacatccttgacgcccgagtggacggcactcagcgagtagaaggcggtatcgaggctgcgggcgatgatctccgagagcgtcgtcttgcccactcctggagggccccagaagatcagcgacgggaggcgctgctgctcgatcatagggcgtaagataccctgcggcccgacgaggtgggactggccgaagtagtgctcgaggctcgtcgggcgcatgcgctcggccagcggcttgagggtggtcataggcgggagtgggctggtaggcgggggttattgagggaggtcgctgtagcgtcggcgtccacgaaggtagtactgcacgaggaggctgtaaggcttcatcaggctcgtggggaggggacggacggtcttagcgatattctccttgcgcacctcttcgtagcgctggcgcttgatcataaagcagcgccagccctcgaggacggcgtagcagtgacggggcttgagctgaagaaggtagacgaaggcggcgaagacgtcgaggaagaagcggcagagcagcacacggtgcaggcgaggtgcggggaggttcttgtagatcatcaggaggttgttcctgaagttgaggaagaccttccttgggctctctgctgagaggctggcaccaccgacgtggtagacgaccgaggtgggggcgaaggcgatgcgatgcccgcgggcattgagtcgccagcataggtcgatctcctcctgatgggcgaagaagatcgtatccagcccgccgacctcgagatagacgtcacggcggatgatgaggcaggcgcccgatgcccagaagagatccgtgggggtagcgtactgcccgtggtcctcctcgagcgtgccgaagagacggccacggcagaagggatagcccagcgagtctatgaagccaccagcagcaccggcgtactcgaagctcttcgggtcacgctgtgcacggatcgtaggctggacggcagtgatcgtggggtcggagtcgaggaggcggaggggctcatcgagccagcctcggctgagctcgacgtcgctattgaggaggacgaccgtcttgtagtccagctcggcgatggccttgttgtagcccgctgcgaagccgtggttctcggtgaagaggtggaggcgcacctcgggatagtgctcgcggacgaaggctacggagtcgtccgtcgagccattgtccacgatgatgaggtctgcgcctgcgggggtgtgttgcacccaagaggggaggaacgtctccaggaggctacggccattccagttgaggacgaggacggccacctcggcgtgtgtggtaggatgcatagagtgtagtatagttagttgtcttgctcagagtcaaggagtgcttggagtcgggcactgcgtacagcctcggggtagttctcgagggggcgcttccagcgcttatgcgaccagagccaggctgctgggtcgcgctggatattcgcctccagcatacgggcatagcgctcggtgacggtatagacgggtaggtcgccctccgctgggtcgtagataggcacgtagtgccctacgaactggatggggctccttcgctcgatgtcgaagtagaagacgggcacgcggtacttcttcccgaggcgctcgatgccgtcgaggatcgctgtcggctggtggaggaagtcggtgaagtaggtggcgtgaccgatgcctggagcttggtccgtgatcatcgcgacgaaccagtgacggccgtccttagcacgcacatactcgacgatgtggcgtgcgatcttgtccttggcgacgaggcgtgcgccgaagcgctggcgttgctcagcgaagaggcgatcaagggccttgctcttcagcggtcggtagacctgatccatactgtagccgatggtggcgagctggatctgccccgtggagaagagctcccagttgccgtagtgcccgagggcgacgagcacgcagtcatactccttcgctgcctccacgaggggcgagaggtcgggcatgatgaagtgctccgtggtgaggcgctcggggctctggtgtaggagcttcggcgtggagaggaagttgtaggcgaactgtaggtagaagtcccgctcgatctgtcgcagctcctctgttgtcttctcggggaagctacgggagaggttacctcgcacgacggcacggcgatagcccacgacccgcccgatgaggaaggcggtcgcatggcacagcgcgtggatgaccgcccacggtaggcgtgccaaaaggccgaagagtccgcgaaggaggtagtaggtcagctgctcagtcatctctcgtacgtgctcaatagacgaaggcccccgacgcatcgaggtgctgtggggtgatccgtgtcgtcgtgccgatagccgcctcatcgtagggctgcgccacacggatatagttctcactgtggcccatcatgcggccgtcatagttgccgtgctcccagatgaccgtaagctcacggccgaggttggcacggtagaagtcctgcagacgctcctcagagaggcgggccagacgctgactgcgcttgtgcttgtcgcggggcgtgacggcatgctctatggagagggctgccgtgccttcgcgctccgaatagctgaagacgtggagctgggagaagggtaggccctctaggaactgatagcattcctcaaagtagcgctcctcttcgccacgtgtgccgacgatgacgtccacgccgatgaaggcatggggcatcagctcacggatcagctccacacgggagcggaagagcgctgtatcgtagcggcgcttcatcaggcggaggacttcgtcgctaccgctctgtagggggatgtggaagtggggggcgatacgccgtgaggtggcactgtagcggatgatctcttcgctgaggaggttgggctcgatggagccgatgcggaagcgctcgataccctcgaccttatccagtgccttgatgagggcgaagaagtcttcgccaggatggcccttgccgaagtccccgatattgacgcccgttagcacgatctcgcgagcaccttcgcgagcgatacgctcggcttcggcgacgatctcggcgatcgagccgctacggcttcgccctcgggccttggggatggtgcagtaggtgcagtggtagtcacagccgtcctgtaccttgaggaagtggcgcgtgcgctcgtcggaggacgagctgaggcggaaggtacgtatgtccttcgtacgccctctcacgatgctggcacccgcatcgcgggggcgctccagatcgaggtagtcggcgatgtcgagcttcttctccgatccgatgaccagatgtacgccctcgatgtctgcgatctcctcggggctgagctgggcatagcagcccgtcacgacgacgaaggagccaggatgctcacgggcagccttgcggatcatcgtacggcacttcttgtccgctagctccgtcaccgagcaggtgttgatgacgcagatatcggccacctcgctcggacgcacactccgtaccccttgggcaagcagcgagcgcccgatggtcgacgtctcggcgaagttgagcttacagccgagggtgtagtaggcggctttcttgtcttcgaagacagaggtatcggtcatcggttgggtcggaagagaaggcggagataagggtaagtggagagcataagcgagagtcccagccccgtatagaagcccgtgacgaaggagtggggcacgaggtcaagggcacgcagggtgatgccgagggtgatcatacccgccatgatgatccacgaggagggtgtgaagcactggtaccagcgcagggtaccttcggctcgctgtccaagggcggtgagattacgcttcacgacacgggggaagatgaagccggcgaagaatgccaagctcccgatgagccagaggatgctcacgaggatattcgtctcgctgggccagttcaccaggccaatgcgcaggacattgaccccagcgatgagccagagtagggcagcgagcccatagagctgacgatgggtcatcagaggtgggtgactgaagggtgtggggttaagcttcgtcggtccactcgatatcgaaggactgaagctggaggtcttcgtcgtgaagcccctcggtcgtggcctctgtgtggtgagcgtgcgtggtgcctgcctcggcggcagtgggctcatcgcctgcgagggcggcgtcggagacctcgaggatggtctggcgcagggcctctgagaccttcgcgaagtcctcttcgtagatgaagatacggtgacgctcgagcttaccttcgctctccttgagcttggtctctgagagcacgatgtacttattgcccttgctgtcgagcttagcgtctatgtaatagtatctggtcccggccttgagcttacgtgaggccaaaagggttgatcctccccaatctttatccatactcataagtgatcaattcttttttatacgctacgaagttacggaaatacctccattgtcctgcgggcggactgccccgcccccgtagggatgtcgcccagcttctcgcccgcttgtagctccgctctgctattcgtcctcacacccgcgcactacgtctattcctcccgatgactacagggataattcgccccgactatggattttctcccgcagcaccgctacaattcctctgtccacgtacgtagatttatcgtccacgcacctaacccctattatcctcgtgcgtagtcctaatatccacgtacgtggacgaaggaaatctcctactgctccacgccttttcttcgctgagaataggcattcatcctctactccttccgcctctaaagagtggtggtagccacaccgcagaaacggagggctcgtcgtatctttgtagggtgcaagggtgcgtttaaggcatatctttgtaggcatcccatggtagttcaatatgacttcaatcagtatgaccaatcaatacagcacagaggaccaagtggcttacatctatgagctacttggcataggtgagtgtgaagagattgaatttaagagtgcaaagggaggctttgcgaaggagatttggcctacgtattcggcctttgctaatactcatggaggcgtcatcgtccttggagtcaaggaggaaaacgatgccttgcgcctaagtggcctcacgcgagaggaggctgagcagtgtaaggataagctttggtcacaggtgcgtaataaggaggtgatcagtctttgtcttctatccaatgaggatgtgcagatcatagatgtggatggatcgtttgtgttgactgtgagggtgcctcaagcaactcggatacagcgacccgtttattgcaagcgcatacccgatgatgggacctacaggcgcaatgctacaggggacttcctctgtaccccagcagaggtgcgtcgtatgatggccgatgcggacttatcccgccctgctgatggtcgtattcttaagggatttacgtgggaagatattgatctcccctctctcgagcaatatcggcgtctctttatgacagtccatcccgaccacccttgggtgacagaggacaatgatgggctaatgcgtaagctgggtggctatcgacgggatcgagagagtggtgaagaaggattcaccttggctgggcttctgatgtttgggaagttcgaggccatcaaggatcctgcctgtgcaccgaactttttccccgattataaggagattacctccgatagtgaacgctggagtgatcgtatttatcctgatggcacatgggaggtcaacctatttcagttctatcgtcgggtgctaccgaagcttcaagcatcgttgcccaccccctttcgcttagaggatggtgtgcgccgagatgggacgctggctcatgaagcgcttcgtgaagctatggccaatctgtgtgtgcatgcggactacagcgaggaggcttcacttctggtcaccaaatatccagataagatcatcttatctaatccaggcgtgctactcatctctcgcgaacagttctttaggggcggggagagtgtctgtcggaatacatcgctccagcagatgtttatgatgatggggcaagccgaaaaggcgggtagcggtgtcgacaagatcctcagagggtggaaggcttcgcgctggggtagaccctatcccaacgaactcttgcgccccaataaagtggagcttgtgatgcccttagagtcattgctggatcctcgtatccttacctccttgaaggatcagctcggtagccccattgatgagcttgatgagaatgaactgctacttctcgcgaccgctcagagtgaagatgttattaatcatgagcgactcaaagagttgctcccgatgcatccagcagatatcacaaaggttcttcagaagcttcgtcgagatgggctactgatagcagaagggcgtgggagagggtgtgtttatcatcttaatgatggtggtgaagcgagcgagcaaatgatgcaagctatgccttcaaataatgcaagctcggaagctcaaatgatgcaagctgcgccttcaaataatgcaagcttggaagagcaaatgatgcaagctatgccttcaaacgatgcaagctcggaagagcaaatgatgcaagctaccaagcgtaagctcagtgcacaggagacggagcgactcgtttgctgcttctgcactgaatggcggacagctcaagagatagctgactacctacatcggacaaaggatcatgtgagaaatgtaatcctacctcgcctccttaagcagggcgtgcttgagcaaaggttctctgtaaaacggcatcccaatcagcaatatagagcgggacgagaagaataggctaaatttgtaagagaattagcggggcatcccaccccgaccacacttgtatagacagaccaatgacacctccataccctaagtatcacctggcggagttcccccaccagttccgtgtacgctacccaggtaagaccattatgcgctactacaacaagcataatgagcgctgggagaagctcaatggtgagcaggtcgctaacctctgcctctcggcagccaagggcttggcttacctgcagatccagacgggcgaccgtatcgcgatctattcgcccaaccgtgtgggctgcatcactaccgagctggggatctttatgatgcgtgccgtctcggtgcccctctatgcgacgagtacgcccgatcaggtgcagttcattgtggaggatgctggtgtcgagacgatgttcgtcggcggtcagttccagtacaacaatgcctatgaggtgcagcagcgtggcgggtcacttcgccgcctgatcatcttcgacaacgaggtggtactcgcccctggggacacgacctcgatgtactacgatgagttcgtacgccgtggggactccgtcgcctatgagaacaaggcgaacgtgacggcaagccaatcgctggctaccgacctggcggtcatcatctacacctccggcacgacgggtaagagcaagggcgtgatgctgcatcatagcaacttcatcgagcagctctatgcgcaccagatcaagtaccccttcatcacaaatcgcgacgtctcgatgtgcttcctcccgctgaaccacatcctcgagaaggcatggagctacctctgcctcagcatgggctgtcaggtggctgtcctcagcgatccgaagcgtatcctcgaggcgctgcctatggtacgcccttcgatgatgggcaatgtgccccgcttctgggagaaggtgtatatcggtgtgcaggataagatcaaccgctcgcctaagcccctacgctacgtccttcgccacgccatccaggtaggggatcgctacttcttcgacttcgtgaacgaggggaagaaagcgccactcttcctcaagctcctctataagctctacgataagacgctctttgcgaaggtgaagaaggctatcgggctgcagcgcggtcgcttcttccccacggcaggggcttcggtctcacccgagatcctgcgcttcctgcgctcgatcaatgtgcctatgtgtgtgggctatgggctttcggagacgacggcgacggtgtcctcccagcctatggtgggctttgacctcgagtcaatcggtacgatcatgcccgctctcgaggtgaagatcgatcccgagacgagtgagatcctcatcaagggcccgacggtgacgacgggctactacaataatcccgaggccaatgctgaggcgttcaccgaagacggcttcttccgcacgggggatgctggtcgtatggagaatggcgtgctctacttcacggagcgtatcaaggacctctttaagactgccaacggtaagtacatcgctccgcagatgctcgagggcttgctcacggtcgatcccctcttcgagcaggtcgctgtcatcgctgacgggtataagttcgtcagtgcactcatctaccccaactgggaggtgctgcgccgtgaggctgccgagcgtggcgtgtctcgcgacctcagcgaagaggagctcagcaagcagcatgaggtgcaccgcctcgtgatggcgcacgtagaggctgctctcagctccgtagcgcagtatgagaaggtgaagaaattccacctgatgacgacgcccttcacgctggagagcggcgagctgaccaatacgctgaagctacgccgtaaggtcgtcgctgagcactacgccagcgagatcgcccatatgtacgaggagtagcctcgacaccctgatacagaatacaaatacaagaattagatacagacgatgaactattggttcgaatgcaaagtttcctacgagcgccaggccgactcgatgggtatgaagaaggtttccgaaagctacctggtagatgccctctccttcacagaggcagagaagcgtatcatcaaggagattagacccttcgtttcggtcggtgagctggaggtggtgaacatccgccgtgctcgtatcgctgagctcttcctcaacgatgaggccgaggacgaccgctacttccgtgctaaggtgaacttcatcaccgttgatgagaagagtggctcggagaagaagacttccgctacgatgatcgtcaagtccgattcgctgcctaacgctgtcaccgagctgaaggctcagctcgatagccagatggccagctacgagatcgctgcagtcaccgacacgcagatcttagacgtcttccaatatgaagcccctgagaagtgaggatatagctgagcgcctcgataagatacgctctacgctgacgggtggggcgcggctggtggccgtgtcgaagttccatcctgcggagtatatcgagatggcgcacgctgcaggccagtgcctcttcggcgagagccgtgtgcaggagctggtagataagtgggagggcctccgtgagcgctatcccgacctcgtctggcacttcattgggccgctgcagacgaacaaggtgaagtacatcgctcccttcatccatatgatcgagagcgtcacctctgagcgtctccttctggagatatgccgtcaagcccagcgtgtggggcgcaccattcccatcctcctcgaggtgcatgtagctcgtgaggagacgaagagtggcttctcccccgatgagctacgtgagctcctcgggcgcatcgcttcgagccccgagacctatcgtggcgtcgctctccatggtctgatggctatggcgagcaatgtcgatgatgaggctgtcatcagtggtgagttcgccacggtgcatcgtctcttcgacgagatccgctcctcgggactgctcctccagcccgagctcttcaccgagctctctatggggatgagtggagactatccgctggcgctccgtgagggcgctaccctggtgcgtgtcggctccgctatcttcggagaccgcgcatagtatatatcgaggtgtcttcgccccgctgcccagcgtggagagggctcctacctcaatttagcaatccatctatgacttactggacgaagatcctgagcctcgcgctcggcctactcctcctcacgcctgcgtcggctcagacgaagggcaaggaagagaagaagaaggataataagtttagctacgtgcaggctgtcgatatcttcggctcctcactggcgctccttgaccgccactttgtcgactccatcgatatcaagcgtctgagccgtatcggcttggacggtatgctcgagagcctcgacccctataccgagtactattcgtcggaggataccgacaagctccgtctcctgacgactggggcttatggcggtatcgggtcggtcatctcgcagcgccccgatagcacgatcatcatcaacgaccccatggagggtatgcctgctgcacaggccggtctgcgtgccggtgacgtcatcctcgaggtcgacggtcaggacttccgtaagtcgaccagcgataaggtgagtgccgccctcaagggtacgcctgggagcaagatcacgctcctgatccagcgtccaggggagtcgaagcctcgccgcatcgagttccgccgtcagaagattcaggtcagccctgtaccttactatggtgtcatcgggaaggatatgggctatatctccctcactggcttccccaacacggcagccgctgaggtgaagaaggccttcctggacctcaagtccaagcaccagctccgtgggctcatccttgacctgcgcgacaatggtggtgggctcatcgacgaagccatcaagatcgtcaacttcttcgtccctgcaggtgaggaggtcgtgacgacgcgtggtcgcaatgcccgccgtcaggaggtcgtctatcgcacgactgacaagcctctcgacacgcagatccccatcgcagtgctcatcaatgggcagtcggcctcggcctccgagatcgtcagtggtgctctgcaggatctcgatcgcgctgtcgtcatgggcgtcaagagctatggtaagggccttgtgcagacgacgatgcagctcccctatgatgggacgatcaagctcacgacggcgaagtactacatccccagcggtcgctgtatccagcgcatcaactaccagtcgctacgtgagggtaagggcgctacgatcctgcctgacagcctgacgaaggtcttccatacgcgagcaggccgtgaggtccgtgatgctggtggtatcctccccgacatcgctctcacgaatgactcgctgcccacgatggtgtactacctgcgtgtcaataacgatgccttcgactggatcaccgactatgtgcgcagccaccgcacgatcgcttcgccccgtgacttcaagctcacggatgcagactatacctccttctctaatcatatgatcgagaagaagttcgactacgaccgccagagcggcaaggagctgaagaagctggaggacctggcgaagttcgagggctattacaacaagagtcgtgaggcctttgaggcgctgaagaagctcctcgtccccgacctcaagcacgacctcgaggagcatcgtcccttcatcgagcagtatctgacgggggctattctcacccgctactattacaatagaggggcgctggagcgcagtgtcgccgaggataagatggtgcgtgccgcagaggatctcctcgcagatcctgcacgctacacgaaggtcctgagccgccccgaggctaagaccgccgctacccctacagcgaagtagtgcgatgaagaaaatcttttgccccaagtgcgatacggcgatccctctgaggagggagcgtatcgaggagctacaggcctcgggagaggatcgcctctcgatcatctgcccgcagtgcacgcatcagctcaacctgcgtctgcgcttgccttcggctaagagcacgaagcgacaagagcagcgcacctccgtcgggcatatcatcgtggtagagaatgtcttcggctataagcagctcttccccctctacgtcggggtgaatgctatcggccgtcgcaacaaggataccgccacggatatccctatcatcacctccgacccgagtatggatcgccatcatgcgatcatcaaggtcaccgaggggcgcacggggaagctccgcttcgctgtggcagatgacgatagccgagtggggaccttcctcgcaggcgagcttctcgccccgaaggagtggcgctacctccagcctggagacgtgctcacgctcggcgctacctccatcatcttcagcgacgaacctctccccgaagatcccaccatcgaggagtcgtagcttgcgccttccctctccactcgcggggccaacgagctacgctcaccgctctcgtcgtggtggacgattttttacgtctgcatagtatagtgggttgcttatgtgcgtattttttgcttactttgcagaccgattgtagagtcctcctgagggaggtgaagatacaagtcgctgattacgttagaaataacaaactaaaatataagagtaatgtcaaagatttgtcagattacaggtaagaaagccctggtcggcaacaatgtctcgcactccaatcgcaagacaaagcgccgcttcgaagtcaacctgtttaccaagaagttcttctggccagaagaagggtgctggatcgtcctgaaggtgtctgccgcaggcctccgcctcatcaacaagatcggtctcgatgccgctgtgcgtcaggctgcaaacaatggctacctaagtgaaatcaaagtaaagtagtaggaagatcatggcaaagaaagctaaaggaaacagagtacaggtcatcctcgagtgcactgagcacaaggagagtggtatgccagggacgtcccgctacatcacgaccaagaacagaaagaatacgaccgagcgtcttgagctgagaaagtacaaccccatcctcaagcgtatgacggtccataaggaaatcaagtaatcacgaggagacaagacaatggcaaagaaagcagtcgcatcattcaagaaggccgacggtcgtacctactctaaggtcatcaagatggtcaagtcccctaagacgggtgcttacatcttccaggaagagatggtccccaacgaagccgtcaaggagttcttctcttaatcgaacgaacttcgtcgggtgctctgccctcgctatagaggtcgcacccaccgccgctacccgagtgtagcaaacacctacaagaggctgccccatgcaatgcaagcgggcagcctcttatcttttcgagacctccgagttaactcccctcaccgcgcctctatcagctgcggtgccgaccctataaagcagagatcttcatgtctacgcaggtagaaaaaaacaccgagcgcatcgagcgcttagctcacgagagcatcccacgcctccttattcactatggtgtcccagctattgtggggacgatggtcaatgcgctctacagcgtcgtcgaccgtatcttcatcgggcagggcgtcagtgaatttgctatcacggggcttgctctgaccttccctatcctgatcttcatccaagccttcggtatgcttatcggcgtcggggcttcatctcgtgtgtccatcctcctcggcgagaacaagcacgatcaggctgagcgtatcctgagtaatgccctcctgctgactctggtcacgcaggtgctgaccttagtgccggtgatgatctggctcgacgatatcctccgtgctctgggggctaatgaccgcacgctccccttcgcttacgactatctgaagatcatgatcccggggaatatcttctcgacgctctgcttcagcttcaatgcgatcatgcgtgcttcgggatatccctacaaggcgatgatcacgatgctcatcggggcagggctcaatacgctcctcgatgcgctcttcatctatggctttgactggggtattgagggggctgcttgggctacggtgatcgctatggctgtgtcgtcagcgtttgtgatgcagcacttcctcagcagcaagagcgaggtgcagttccgccgacgcaatatgcgcctctcctccgagcagatcctggcgatcctctctatcggtatgtcgcccttcttcctgcagctcctcagtagtggcatcgccttcctcatcaactctaccttggctcgctatgcggagaattctctgatggctgaccgagcggtgggggcttatgggatcatcaatagcgcggcccttgtgggctttatgttcatgctcggtatcgctcagggaatgcagcccatcgtgggctacaactacggagcccgtgcgatggaccgtgtgcgtcaggccttcaagatctgctcgtctacgaacttcggtatcggtgctttcgtgactatcgtagcggtggtggcaccaggcttgatcgcctcactcttcaccagctcgcctgagatgatcgaggcctcggtgcatgcgctacgcctctgtctctatggctttgccttcgtaggcttccaggtcacggctacgcagttcttccagagtatcggcttcggggggaaggcgcttctcttgagtctctctcgtcagatcctcttcctcctgcctgcgctcttcctcttccccctgctctgggatgctacgggtgtatggctcgctatgcccttctcggacatcgctgcaggggtgctggggatgatcctgatgtattatcagttcaagatcttcgaccgtaagttctcctccgaggggctctaaggtcgcacgccactttccctttatactatggtttatttgtattcggtcctctgctgcctcttcctcttcccgtacctcgggtggcgcgcagggcaagtgctggggccacgtctgcgccgcgtcttctggggcttgctggtgctgatctttgtactcttctccatcgcgctcctcatccatcgccgcttcgaagccgactggatgagtgccgtgatgaatggtagcgtgtacatcttcttctctacgatgtacgccacggccgtcgtcgtcggggtgaatatcctacgctatatcgatgcgcgcacattcaagctctatgcttcggctcgccctgcggtaaagcagggtgcgaaggtcatcgccttcatcgctacccttgcggtcttcttcacgacgatggtcatcggccaccgcaatgtgcgctacccgcgcgtcatgtatcagaagtacaccgtcaagcgtctagtgcccgaaggggcacagcccgagaagcgcatacgtctggtcttcttctccgacctgcatatcggcgaggcgatgacgcccgactatatcgctcgtgcggtgaagctcatccaagaccagcagcctgacctcatcctctgcggtggggacttcatcgatcaccgcgccgtctacgcttatgatccgcgtgtgatggcttcgcttcgctcactccatgcgcctctgggtgtgtactacgtcttggggaatcacgaatatcgtgacgatctggaggccaatatccgctgggtctccgaagtcggtggtacgctccttcgcgacagtatcgctttccctgggaatggcccgcttacgctcatcgggcgtgatgactgggtgaatggcaaccgaaagcccttcgaggtcatcgccaacgaagcggatcccttgcgaggacccgtcgtgctcatggagcatacgcccgcctcgatagatagcatcggcgatagtcccgtggacctcatcctctgtggccatacccacggcggacagatctggcccggccaactgatggtctggtggcgctacggtatggtctcgggtacgcgccctgtgggtgagcgtgaggtgtgcatctcctcaggtatcggctcggcgggtgcgacctaccgcgtaggtacgcgcagtgagatccgcgtctacgacctctactggtagcgggctatagctccgctccatccaaataccgccaagcgccagctctctcaagagggctggcgcttggcggtattctttgtctgtgtgggaggggtatctcgctttgttgtaggaggatgtggtgctcctgtgctgctgtaagataggctacctcgtaggtgggtggtatgaaccactattggtccgtgagcgaaccagtagtggttcgttttctgaccagtagtggttggctcgttgaccaatagtggttcgctcacggaccagtataggttgatattcccttccttggcttctccttttcttcatcctcggagtgagatgccaccttgcgggggtagagaagggggaggtacccctcctttggattgcttgcttgggtcttctccccgccatgatggggatttcggctggcgtaacgttgtctttttgctttgtgtataatgctttttggtcagggagtcatgtgtagtgtgtaagtgtttgtggggtagttgattgttttatgggatgaagttacctatatttgcctgccgaaagcggaagttgatgacctgctgttcgccatcacgcctctgctaatttcccccaagtaaaatcctcccctatagattatcgatgtagaaagagatgagtgaggccagaatactctcagttgaagagctgctaaagctcaatttggttattcccagctaccaacgtccctataagtggactgaaaagaatatcagagagcttattcttgatattcagaagggcattgaggacgcaaacaagcatccgaactttaagtatcgcgtaggtactgtaattctccatgcgaataccgaggaggagaagccgacgtatgacatcgtcgatgggcagcagcgtatcctctcgttcttgctattgaagctgtgtctgagcccaaactttacatgtagtctcctatctgccaagttctcggataaggttactctgggtaatcttcatagtaattcagatagaatccgtgaatggtgttcttctgtagatgtcggggtcaaggaggcctttgataaggctctcagtgaggtgctagaggtagttgtccttacggtcaatgaacggagtgaggcttttcagctctttgactcacagaatactcgagggcgtgagctgtatccccatgacttactcaaggcttatcaccttagggagattcatgataagtatgatatgcagcgtgctgtcttgaagtgggagtctaaggatcccaaggctattcgtgagctcttcgataactatctctttccgctatggaattggtccaagcggcggaagtctagccgcttcactgcagctgaaatagatctttataaggggattgaggagagttcggggtacacttatgcacgccgggctaacaaggctatgccttacttcctgctttcggagccactgatctcaggaggagatttcttcgagatggtagaccactacatgcaaatgcttcatagtatcaagctggagcttattgacaatcctgattttgcacgcatcaaggagctactcattgatgataagtcaaaggtggggcagatcaaaactccagcagacttagataaggcttgtaagtcttcatcgacggggatgaatcatgctcgcaatctatttttttgcgctctgctctgctactacgaccgcttccataacttcgatttgatggcagtgaagaagctgtttacatgggcgatgatgcttcgagttgatatgaatcatttgggctttgataccgttaatcggtatgctattggccttggagataatgataagtataccaattctgagcccgtaatttcactgatctcttcggctcgtaggcatacggagatatcagggatgcctctgatggtaaaacgagataatgataaggctgagacagagaagtggcaggggctgtatgaagaccttctactattaaacggatataagtaagatgatacaggaactgagaatacttgatgatgagaccctctttgataaggaggtgcactatgtgatccctcgctaccagcgtgcttatgcctgggaggataaggagatcgtgcagctcatcgatgatatcaatgactccactggggattactacatcggttcgcttgtcgtggctaaggtcaagggtaaggaagagacatatgaggtcgtggatggacaacagcgcctaactacgctctatctcttgctgcactacctagtctcacgccgtcgcttggaacgagaggttgggaaaacactttcgtttgactgtcgtccgaactcaaactatacactggttcatattcaagatttgctctcgaaggagaagcctcttgcggatgatatggatcgaatagagcagtctattcttaatggactcaaggtaattgagcagaagttcacggtaggagatgtcattgatgtagaagccttcattgagcgcctgaagagtgtaattctctatcggatagaggtgcccgagcatacggatcttaatcgctactttgagatcatgaatacccgaggtgagcagctggagcaacatgatatcctcaaggcccagctcatgaggtatctcagtaataggagagaacaagagttcttctccagggtatggaatgcttgtagtgatatgacaggctatgtccagatgcactttgcgaaagcggagagagaggagatttttggcgataaatggtcgcctgataagttgtcggggagttggtctcgctatacaggttgcctaaagatgggtcagagtgctgatgagggattttcaatcacaagcgtcacgagatccgactttaaagttgcggcgttggatgctgtacgagagagtgacaatactccgatacgtttcgatagtatcataggcttccctcatttcttgcttcatgtcctccgagtttttcttcgtgttgagaatgtgtctttaagtaaaggaagtggcttgggtagcttgcttgatgacaagcgcttgcttgcagactataataaggtgatcgcttgtgggcaaatgggtgctaagcctatcaaggagaatgaggcgagcttcgcccgtaagtttattctgttcttgttgcgttcccgcttcctgtttgatcagtttatcatcaagcgcgagtatgcaggtgatgatcaagaaggcgcctggagcctcaaagagttgtgcactgcgggcgcagggtataagaagaaggcttactatgcaaacacaagacttcgctatgagaatgagtgggagaagacctatgcaccacgcaataaggagtgtctgatgatacagtccgcactacgtgtatcgtacacatctcctaaggtgatgcactggataacggaactgctggtgtggttgtttaacaacaacgagaccgagcgatacaaactaaccgacgaggcagagcgcatagcagcagaagctgtgatggagaacttcttagatccgggtaattatgagctcggtgtccagactccgcatgttgtcttcaactacctagactacttgctgtggaaggaagataaggagaagtataaagactttgttttcgagttccgtaactcagtagagcactggtatccccagcatccgtccgaaggtacctttgaggcatgggacgggatagataccttcggcaatctgtgtattatctctcgcagtgtcaattccaagttctctaatctctcgccagaatctaagatgaagtcttataagaagatggtgcagaagggtagtctgaagcttcgcatcatgggtgatatcattgaagggggctccagcgaaaagtggaggcagtcagagtgcgctaagcatgagaaggagatgatccgcctgctctgtagggctctgcaggaagccgtagaagaggaataggctataggtctctctgcttttcgcgcacgcacctggtggtcgtaatatgcgctgttagtttaccgccctcgggattgtctcccgagggcggcgttgtcctttagtccagcttatgcggggaggagtgcaaataactattggtgtggggtgcaaacgagtagtggtatgcggtgcaaacccatagtaggttgctgctccgcatagggataaaagttgcggacgagtggcagataagttggggctacgtacgtggctctaatatctacgtacgtggatatttggatttgcgtgcctggtctttaagactacgtgcatagatagaagaataccactacggggaggagcatttttctttgcgagaacagcacttttccctccgctggataagaagaatactcgtgataaggcgaagggcttgcgtatcacttcggtgaggtatatcgtggggctgagcgtgcgatgccttagcataataaatagagggcgggacttgcggcaacagtcttcatatagtggttgcttctacgagcttgtagagaggggagtttctttcgggagggaaggcaatggctggtagtagggtcgtgtagcttggaggagggcttgcgaaggattagcgggtgatgtagagggttttatctcctttgcggtaggtggagcgtgtggtgacgaaggttgcgcttccgttgtggtggaggggtggattatacctcggatagggggtgtcttaaggctgtgctgagttgatgcgatatgcttatgcttgtgtgagttgcaagtgtggcaaatagtttgtaaatttgcatgctttttatgcgccgatgtgctcctttctgaggggcgcttggtcgcagagaaggcactaagcagtatgtttaaatattgtccgggacgtccggatcaatttaattctcaatttaatgacagatcctattgcagattatctgacgcgcctgcgtaatgcagtgaaggctggccatcgtgtggtcgagatccccgcgtctaatctaaagaaagagatcacgaagatcctcttcgacaaggggtacatcctcaactttaagttcgtcgaagatggccctcaggggagcatcaaggtggctctgaagtacgaccgctcgggtcgtgtgaacgccctcaaggccctgaagcgcgtctctcgcccaggtcttcgtaagtatgtcggctatcgtgagatgccccgcgtactcaatggtctcggtatcgctatcctctctacttcgaagggtgtcatgaccgataaggaagcttcgcagctcaaggtaggtggcgaagtgctatgttacatctactaaagcaaggaggtacaaactatgtcaagaataggtaagcaccccattagcatccctgctggcgtaacggtgtccgtgaaggatggtgtcgtcactgtaaagggcgctaagggcgaactcactcagagcgtagatgctcgtatcgaagtagccgtagaagatgctcaggtcgtcgtccgtcgcggtagcgatgatcgccaagagcgctcactgcacggcctctatcgtgccctcatcaacaacatgatcgtcggtgtctccgaaggtttcaccaagacgcttgagctggtcggtgtcggttatcgtgcatccaaccagggtcagatcctcgagcttagcctcggcttcacgcacaacatcttcctccagctccctaaggaaatcaacctggagacgaagactgagcgtaacaagaaccccctgatcatcctctcttctgctgacaagcagctgctgggtcaggtgtgctctaagatccgctccttccgtatgccagagccttataagggtaagggtattcgcttcgaaggtgaggttgtccgccgtaagtcgggtaagtcagctggtaagtaaccgcttaaaacacgtataaagcaatcatgttgaagaaagaaataagaagacagaagatcaagacgcgtgtacgtgccaagatcagcggtacggcagagcgtcctcgcctgacggtattccgaagcaacaagcagatctatgctcaggtgatcaacgacgtcgatggcgtcacgatcgcaagcgcctcttccctcaagctcaatgctgaaggtacgaagaaggagatcgcagcactcgtaggtacggaggtagctaaggctgcccaagccgcaggtgtatccaccgtagtatttgaccgtaatggctacctctaccacggccgtgtgaaggagctcgctgatgctgcacgtgcggcaggtcttaacttttaatactgtctatcgcaatgtcagataatcgcacaaagacaaaccgagataccgagcagaaggataagctcgtagagcgcctcgtggccatcaaccgcgtaaccaaggttaccaagggtggtcgtaccttcaccttcgcagctatcgtcgtcgtcggtgacgaagaaggccgtatcggcttcggcctgggtaaggctggtgaagtatccgcagctatccagaagggtggtgctgctgctcgccgcaacctcaagcagatccccctccacaagggtacgatccctcacgaacagtccgcatccttcggtggtgctcgcgtcttcctcaagcccgcttctgccggtaccggggttaaggctgggggtgctatgcgtgccgtcctggaaagtgtcggcgtaacggacgtcctcgctaagagcaagggttcgtctaaccctcacaacctcgtcaaggctacgatcgaagctctctgtcagatgcgctcgcctctgatggtcgctcgccagcgtggcatctctgtcgaaaaggtcttcaagggctaatcatcatccatagactctaagtacaatgtcaacgataaagatccagcaagtacgtagccagatcaagagccccaagactcagaagctcacgcttcgggcacttggtctgaagaagctcaaccagacggtcgagcacaaggacaatccccagatccgcgggatggtcgagaaggtaaagcacctggtgcgcatcgtagagtaatcaccctataaagaaagacagaagaaaaatggatttatcaagtttgaagcccgcagcgggctccgtcaagacgcgtaagcgcatcggtcgtggtcctggttctggtctcgggggtacttctactcgtggtcacaagggggctaagagccgctcgggttattctaagaagatcggcttcgaaggtggtcagatgcctatccagcgtcgtctgcctaagttcggcttcaagaatatcaaccgcgtcgaatatgcacctgtcaacctctccacgctgcagagcctggcagaagctaagagcctgactcgcatcgctaaggcagacctcatcgaggctggcctggtcggtaagaacgacctcgtcaagatcctcggtaacggtacgctcagcctgaagctcgaggtcgaggctaacgccttctccaagtccgcagaagcagctatcatcgcacagggaggtagtgcagtaaaactctaatagctcatgcgcttaatagagacactgaaaaacatatggaaggtagaggagctgcgtcagcggatcctcaccaccttgtttttcgtcctgatctatcgcctgggatcgtacatcgtcatcccagggatcgatcctaaccagctcagcgccctgcacaagcagacaagcgaaggtctgatggcactccttgatatgttctcagggggagcattctctaatgcttcgatcttcgctatggggatcatgccttatatctccgcgtctatcgtgatgcagctcgccgctatcgctgtgccttctatccagaagctgcagcaggaaggggagagcgggcgccgcaagatcgaccagtggacacgctatctaaccgtcgtcctgctgctcgtccagggttcggcctatctggtcaacctgaacatgcagctgcgccaagcagggggctcactgcccgaaggactgtggttcgatatctatgcgatcgtcgtcatggctgcaggcagtatgttcgtcctttggcttggtgagcgtatcacagacaagggtcttggcaacggtgtatctctgatcatcatgatcggtatcatcgcccgcctcccaggagctgtgctcgccgaatgggggacgcgcgcctctggcggtgctggggggctcgtgtggttcctcttcgagatcgtcttcctgctcgccgtcatggccggtgctatcctgctcgtccagggtacgcgtcgtgtgcccgtacagtacgctaagcgcgtcgtcgggaacaagcagtacggcggtgctcgccagtacatcccgctgaaggtcaatgccgctaacgtcatgccgatcatcttcgcgcagacgatcatgatgctccctatcacgctcctcagctgggcacagggtgaccgtgccaacggcttcgtacaggccttcatggacaatacgagcatttggtacaacctggtcttcgcgatcctcatcctcctcttcacctacttctacacagcgatcacgatcaacccaacgcagatggccaacgacctgaagcgtaacaatgggtttatccccggtgtgaagcctggcaaggctacgaaggactacctcgatgcgatcatggaccgcatcaccctccccggtgccttcttcctcgctatcgtggctattatgcctgccttcgctcgtgtcatcggtatctctgggggattcgctcagttcttcggtggtacgtcgctgctgatccttgtcggggtcgtcctcgacacgctccagcagatcgagagccacctcttgatgcgccactacgatggtctgctcaagagtggccgtatcaagggacgtaccggctctgtagctgcttactaagatgatctacttaaagacagacgaagagatcgaactcatgcgcgcggccaacctcctggtaggtcgtacgctcgccgaggtcgctaagatcatagctcctggggtctcgaccctgcagctggacaagcgcgctgaggagttcatccgtgacaacggtgcgactcccgccttcctcggctacaatggcttccctgggagtctctgcacctcggtcaatgaccatgtggtgcacgggatcccttcctcgaaggtcgtactcaaggacggtgacatcgtctccgttgactgtggcacgaagctcgcaggcttcactggggactccgcctacacgttcgctgtaggtgaggtagctcccgagactctggctctccttcgcacgacgaaggaatccctctacatcggcatcgagcatgctgtagcggggaagcgcgtcggtgatatcggcgctgcggtccagcagtattgtgaagcacgcggctaccatatcgtccgcgaacttgaaggccacgggatcgggaagaacatgcatgaggagccaggtgtgcccaacttcgggcgccgtggcacggggcctgagctccgctctgggatgtgcatctgcatcgagccaatggtgaacatgggctcgaagaatgtcatcttcgatcgcgatggctggaccgtccgtactaagacgggcaagccttcagcccacttcgagcactgcgtcgctatccgcgatggcaaggccgatatcctctcttcgtttgactttatcaaggaagtcttggtagacagagagttttaatctcgcaaccacagtatatgccgaagcaagcagcaatagaactcgacggtgtcatcctcgaagcgctctcgaacgcaatgttcaaggttgagctcgagaacggacacgtcatcaccgcccacatctctgggaagatgcgtatgcactacatcaagatcctcccaggtgacaaggtcaaggtagagatgtctccctacgacttgactaaggggcgtatatcattcagatataaataaccctatatagatatgaaagtaagagcatcactcaagaagcgcaccgccgactgcaagatcgttcgtcgcaaggggcgtctgtacgtaatcaacaagaagaaccccaagttcaagcaacgccaggggtagtctctaaccatcggactatattttaacgaactaagataagtatggctatcagaattgttggcgtcgacttgccacaaaacaaacgaggagaaattgccttgacttacatcttcgggatcggtcgtagcagcgctaccaagatccttgataaggctggggtcgatcgcaatatcaaggtaaaggactggaccgacgaccaggctgccgctatccgtgaggtgatcggtgccgagtacaaggtcgaaggggatctgcgctccgaagtccagctcaacatcaagcgactgatggacatcggttgctaccgtggtgtccgccaccgtatcggtctgcctctacgcggtcagagtacgaagaacaatgctcgtactcgtaagggtaagaagaagactgtcgcaaataagaagaaagctactaagtaatagagattgatatggcaaagaaagtagtcgcaaagaagaaggtcgtcaagatcgacgctgtgggccaggctcacatccactcttcttttaataacatcatcatctctctgaccaacaacgaaggtcaggtcatcagctggtcttcggctggtaagatgggattccgtagctctaagaagaacaccccttacgctgctcagatggcggcccaggattgcgctaaggtcgcttacgacctcggtctgcgcaaggtcaaggtcttcgtcaagggtccaggtaacggccgtgagtctgctatccgcaccatccatggcgctggtatcgaagtcactgagatcgtcgacgtgaccccaatgccacacaatggctgccgtcctcctaagcgtcgtcgcgtctaatccctgacttcgcttcagatcacagagtagtttcataaagatcgcagtacactcccagagacgcttcgctcaccgtgctccctccatcgagcaccagggcgcgagcgaacgctaagagtcctgagctaagcaaggcgccgaggtagacgacgagtgaaagattggctatactttcatatatctatcctctcctcataaccggtcgcggctgcactccgcctccctcccgccacccgctgctctctgcctccagcgttgcctctccccgagaggtcgctcgtactgcttcaacaatagaagacaatggcaagatatacaggtccaaaatcaaagatcgcccgtaagcttggcgcacctatcttcggtgccgacaaggtactctccaagaagaactatcctcctggacagcacggcaacaaccgccgtcgtaagacgagcgaatatggcatccagctcaaggaaaagcagaaggctaagtacacctatggcgtactcgagcgtcagttccgcaacctcttcgaaaaggctcagcgcacgaagggcgtcacgggtgaagtgctcctccagctcctggaaagccgcctcgacaacgtcgtctatcgcctcggcatcgctaagacgcgtgcagctgctcgtcagctcgtctcgcaccgtcacatcaccgtcgatggtcaggtagtcaacatcccttcttacaccctcaagcccggccaggtcgtcggcgtccgtgagaaggcgaagagcttagaggtcatcaccgactctctggctggtcgtagccacagcagctacagctggctcgagtggaatcaggcttctctctccggtaagttcctcagcgctcctcagcgtgaagacatccccgaagagatcaaggagcagctgatcgtcgaactatactctaagtaataatccctattatctcactcacatggcaatattagcatttcagaagcccgaaaacgtcctcatgatggatgcgacggactcgtacgctaagttcgagttccgccctcttgagccgggatatggtaccactgtcggtaatgccctgcgtcgtatactcctttcttcactcgaaggctacgccatctcgaccatcaagatcgaaggtgtcaatcatgaatttgctactattccgggtgtcttggaggatgtaactaacatcattctcaacctgaagcaagtccgcttccgtgccctcgtccaggacgctgctgaggagaccgtcagcctgacgatctctggtcagcagcagttcctcgctggcgagctcaacggcaagcttacttccttcgaagtcctcaatcccgagctggtcatctgccacatcgatgaggcgtatacccttactatcgagctctccatcaacaaggggcgtggttacatccccgctgatgagaagctggtcgacacggctcaggagaatgagctgcagacgatcgctatcgactcgatctatacgcctatccgtaatgtcaagtacttcacggagaactatcgtgtagagcagaagactgactacgagaagctgaccctcgagatcactactgacgggagcattcatccccagcaggctctcaaggacgcagcagctatcctcatcgagcacttcagcctcttcatctctgaccctgtcgaagtagaagagaatgcagtcatcgaggaaggcgacgaggaggtactggacatgcaggagatcgatcgcgtatctcagctgctccgtactgatctcaaggatctcgatctctccgtccgtgcgcagaactgcctccgctccggcaacgtattccgtctggccgacctcgtcgtcctcgacgctgatacgctcagcaagttccgcaacttcggtaagaagtctatggacgagctcaacgagctgatggagcgactcggactcaccttcgggatggatgttagcaagtacaatttagataatgactaagtagaaagatgagacataataagaaattcaatcatctcggtcgtaagaaggcgcaccgcgaggctatgctttccaacatggctgcatcgctcatcctgcacaagcgcatcttcaccacggtcgctaaggcaaaggcgcttcgcgtatatgtcgagcccctgctgacccgcgctaaggaagactccacgcacgcacgtcgtatcgtcttcgctgagctgcagaataagtttgctgtcaaggaactcttcggccccgttgctgaaaagatcgctgaccgtcccggtggctacactcgtatcctcaagacgggtaaccgtctcggtgacaacgctgcagtctgcttcatcgagctcgtagacttcaacgagaacatgctcaaggaaaaggctgacaagaaggctgctcctaagacgcgtcgttcacgccgctctacgaaggctacggctgaagctcctgctgcagaaagcgcagaatagtagctctccccccttcgatattctatcggcgagtgcccgctgtgacttcggtcgcagcgggcacttttgctttcgcgcatctggctctccttcctggtgggttgagatagagcaactcttgggcgggctaaaagagaccactactggtcaccgatcggatcagtactggtcacttcagcgagcagtactggtcaccaccacttaccagtactggtcacgatgctgaccagtactggttgcttttcccttctgctgtgcgtctctttccgaagcactgcagaaggaggggctttgtatggggcgtggcggaggaggaatagtgggggaggggcagagcaatagtcgtttgcgttcatcccactattgggcccatatgcgaaccaatagtggaatgcatgtgaaacctatagtggtctgcgagtgaaccaatattggtccgcgtacgaacctatattggtctcacgctcgacctatataggtcggagcagtgacctatataggttgacacacccttccctcggagaggtggggtagcgtacggtgaggagggagcttcagcggcgccttttccctctcggtccttgggcgcaggaggcggtcgtcggggatgaatcgtcgtacgtgttgcgtgataaggcccagggcaaccgcataaaaatgtaagcgcctgattatcaatattcattttcttgtaagtcaaggcatctaatgattatcaataaaacgaaacaatctaataaccagaacgttgtagttttctcgtaattttgatgcggttgccctgtaccctatattgtgatgtcgttatcgcagtgtagggttctttatacattaggtatcactataatcaatattgagctcatgatatacgcatatatacgagtcagcagtgacaagcagacgacggagaaccagcgttacgaacttcagcgttttgcgatgcatgaactacttcatattgaccgctggatagaagagactgtttctggcgggcgcaattatcgagaacgcgagctgggggcattgcttgatcaggttggtgaaggagatatgatcctgtgtagtgaacttagtcgtctgggacgtagtctcttcatggttatggatatcctcagtctatgtatgcagcggcggtgtactgtttggacagttaaggatggctaccgattaggggaggatgtgacaagtaaggtgcttgcttttgcctttgctctctcggcggaaattgaacggaagctgatcgctcaacgtactcgggatgcacttgctcgactgcgagctcaggggagaaggcttggtaggccaagaggaagccagggcaagcgtctgaagctgtctggatgtgaagcagaaatttgccatttgcttgctttgggaaagacgaagagtgctattgcacagagtctcggtgttagcatcccgacgctgaggctatttatccagcggtatcagctgatgcccgaagcgagccctcaagactcagagggaagaattaaggaacatttttccttcacataaagtgtggctatcgaattgcgagataaatagcggatgaaatgggtgtgtgtctattgattaagtgcatagttccggggagctaagcgcgaagatttaggcttctatatttgttgctggatgtcaatgcttgacattctattaataacatttaacccgtgttggatatgaagaaaacatttacaccagcgctactccttggattgcttatcctcggaacatcagttacttcttgtaagaagaatgacgtagaccttaccccttacgagcgacagattgccgaaggtaagaagagtctgagtgacctacaggctacgcatgcaaagagtcttgcagatcttaaggctgctcaggagaagatcactaagctcgaagctgagcagaagagtcttaatgaacgtatcgtaactctcggcgagcaggtcaaggtagcgcaaggcaaggagcaggaagctgctgcaaaacttgctgaagctacggcaaagcttgaagctgagaagaatgctcacgagttgtctatagctcgtgctgagaaggctgaggccgctaacaaggagcttcaagctcgtatcgctaagctcgaagaagaaaagaagcttcttgaagaaggtaagcaggctgaagtagatgctcacaacgctacgaagaccgatctcgctaccgtccgtaaggagctggaagaggctaagaaagaacttgctaaccttaagaaagagcttgatcagctccgtcgtgagaagctcgaagctgagaagaagctcgtagaagtaaacaagcagcttgagatcaagcaggctgagctggctaagagtcaagcagcgcttgccgccttaaagctctctctcaaggagcaggctaatgctgcaaatgatgcactgaaggcactggagcgtcagacaaagatcgctacagagtatgctaagggcaagactgatgactacaatagtaagctcgctgagctgaataaggttaaggctgagatcgcaaagcttcaggctcaggaaaaggctaagactagtgccgaagttgagcctctcaagaagcagcaggaagagctcgaagctcagctgaagacccttcttgctccagttgaagctctcaagaaggagcaccagaaggctatcgctactcgtgaaggtagcgccaagagccttgagactgcaaaaagcatccaatctgagaatgcaaatcgtctggctgagcagcagagggatgcagaggcagctgccaagcagttagaggtgcagaagaaggctctcgaggacgcaaaggcttccggtgacaagcatgccatcgatcaggctcagaaggctcttgatgctttccgccctctcgcagagaagaccattgcgatcggcaaggaagctaaggctgaagaagcaaagaataagaaggctgtagaggatgcagtaaaggcacttcgtgatgctcgattcgcagaagctcaggctgccgctaaggctcaggaggctgaggataagatccgtgtagataagagcaagctcgagaagaagattcaggataagatcgcagaaatcaaggtcctgaatgctcagctcgctgaaatcagcaagcagcgtattgctctcgaagcaaaggcgaaggaacttgatgtcgtcgttacttcagctaagcaggtaaaggatgcagctgatcaagacctgaaggacttagaagagtcaatcgctaagctcaagaagatcatcgctaagctcctggaactcgctaagtaattagttctcttcactaagtatagtcccccctgcctctatctagtttagagcaggggggattatttgattacctcataggctcgcataatgtgttttggactagctcctaatatgtcataagggggagcggaacgttgccctgtgataaggccttgtgattgcgcgcttttttgtacctttgcgacgctttgcgtaatctctgtcaggaatatatgaataagtgtggcctgttatattgcgtttagtgtagtactaatcaaataagctaaaggacaaacaatggactttattaagatcgtcaacgaagctttcgctactggtaagagccaccccgccttccgtagtggtgacactatcaccgttgactaccgcatcagcgaagggggtaaggagcgtatccagcgctatcgtggcgtcgtcatccgcatcagcggtcacggtgacaagaagcgtttcacggttcgtaagatcagcgaaggtgtaggcgtagagcgtatcttcgcgatcgaaagccccttcatcgaaaagattactgtcgagaagttcggtaaggtacgtcgcgctaagctctactacctccgtgccctcaccggtaagaaggcgcgcatcaaggagcgccgctacgtcgctgagaagtaagaagacctcggggatatcttccgcttcacggcggacgggtgccccaagccttcataccaagcatacagccccatcgccgacacgctcggtgatggggctgatgcttgcttatcccctcgggggatagccagtttatatccacatagatgttgatgaaaagaatttccacttcacttgccctcatggctcttgccgtggctttcgcttcgtgtgatgaccccatcacgcgcaaggagcgcagcctcatcgatcgccagtacaaggagggcgtactcaccgccagccagagctttgacttcacgcgctggatcgatgtgagcaagggtgcctatcgtctacccgctatcagcgctgacgaagacgctaagaatacctattgggcctcggccagcaatcagggctacacgatgctcgcctcttcgcctacggactatcccgtcgtgccactggaggagaatggagcggctcatggcgccatcatccgttcgattaagggcttctacttcttcggtatcgggacgaacgtcattgcaggtgccctctatacaggtcaggtcgatgcacgcaatctcgtggggaagccccttgagtcgacgctcttcggtcagccttactccagcggtatccccgagatcgtggacttcacctaccagtacaaggcgggtgagaaggtcatccatgggcaggataagaaggtcgagcttcccagcgaagaccgtgccgctgtctcggctgtcttctacgaagtcaccgacgatgcgagctacctcaatggcgtgacgctgcagacggatgcgcgcatcgtggcgaagggctacgtcgagctggagcctacgactcccgctggcacgtggcagacctatcgcctgcgcctcacacccgtcgacgaagcacgctacgaagccgtggacttcacgacgaagaagtatcgtctggctctggtcttctcctcgagcttccgtggtgccgagtacatcggtgctgtgggtagcgagctgcgcctgcgcgaggtcaagctccaggaccgcattaagccccatcattagtcctgccgtatgaagatgattcgaacgctcctcctcggcctctctcttggcctcctcgcactccccgctcgcgccgctgagacgggggacgagcagccctcacgcctcggtgtaggcgtgcacctcggcttcaatatcggtggtgctctgcccccctccgtacccaagcccgtcaagaaggtcacggcctttatgcctgggggtacgcccaacgtggggctgaacctctcttaccgtctcacgcctgcaagccccttcttcctcctcctcgggctggagtacgatatccgtagctttagcaccaccgtccaagccgaagatatgcccatccgctatcagagcgaggacttcaaggagcagcattacacgggctaccagcgtgtcgagatggatacccgctatgtcgtggtgcccgtgggggtgagctacgctctgccgaatagctccttccgcctcatggctgggggctactatgctcacgcgctcaagcgtaagttcaccgctaagctcgatggcgacggcctcatggatggtcgtgtctatcaggagggcgcggtgcttgccttcagcctcggggacttcctcgtgcgcaatgacgtcggtgtgcgcttcggtgcggactatcagattgacccgcactgggggcttacggcacgtatgaacgtaggtctgccgaagatctttgataagagcttcgaggtcatgccttattcgctgcgtcacgtcttcctcaacctcggcgtcagctaccgcatcaatcgatagccccgctgcgagcgatatccgctaatacactccgccccgctatgtctcaccaacgagtgagcatagcggggcggagtgcttttggggggataggggggctactgcagcaggcggatcttctcctcgaggcgttgtagctcgttgcgcaggcgggcggcatcgacgaagttgagttccttcgcagcagccatcatctcgctgcgcttcgtctcggcaagctcgcggagctggtcgagcgagaggaactgctcgatggggtcttcgacagctgcctcgggcgaagcctcgatgtagggaatggcttcatcggcgcccttcttgtcggggaaggcggaggagctattcttgacgatctgctggggcgtgatgccgttggcctcgttgtaagcgatctgcttggcacggcggcgggcggtctcgtccatcgtcaggcgcatactctcggtgatgtggtcggcgtagaagatgacacgcccgttgacgtttcgcgcggcacgccctgccgtctgcgtcagcgagcggtggctacgcaggaagccttccttgtcggcatcaaggacagcgacgagggctacctcgggtaggtcaaggccttcacgcaggaggttcacaccgatgagcacgtcatagacgcccttacgcaggtcctccatgatctgcacgcgcgtcagcgtatcgacatcgctatggatgtagctacatgagacgccgtgcttgatgaggtactcggagagctcctcggccatgcgcttggtgagcgtggtgacgagcacgcgctcgcctcgctcgatggagatctgtatctcgtgctcgagatcatcgacctgatggagtgtggggcgtacctcaataggcggatcgagaaggcccgtggggcggatgagctgctcgacgacgacaccttcgctcttggtgagctcatattcggcgggcgtcgcgctgatatagaggatgcgtggggtgaggtcgtcgaactcctcgaacttcagcggtctattgtccagcgcagcaggcaggcggaagccgtactccacgaggctcgtcttacgcgagcggtcaccgccgtacatcgcatggatctgtggtacggtcacgtggctctcgtcgatgatgaggaggaagtcattcgggaagtagtcgaggagacagaaggggcgctcaccaggctggcgaccatcgaagtagcgggagtagttctcgatacccgagcagtagcccagctcgcggatcatctccaggtcataggtggtacgctcgtagaggcgtttggcttcgaaggcacggccttcgtcctccagctcctgcacgcgctgaccgaggtcgacgtcgatctgcccgacggcggaattgacctgctcctgcgtcgtgacgaagaggtttgcggggtggacgatgaggcgtgtcatcggcccgtattctctaccgctctgtgggtcgaaggaagcgatgcgctcgatctcatcgtcccagaaggtcacacggtacgccacaccgtcaaagccttcgatggaggggaagatatcgatggtgtcgcccttgacacggaagtagcccggggtgaaggtcaggcggtcgttgacgtagtgattgaggaccaggtcgcgcttcagctgctcctgactgtagcgctgtccctcttgtaggcgcaggatcttctcctcgaaggccttcgggtctgccataccatagaggcacgagacggaggagatcacgatgacgtcctcacgccccgagaggagggaagccgtggcgcgtagacggagcttctcgatctcggcgttgatcgccatgtccttctcgatataggtgtcggaggcggctatgtaggcctcgggctgatagtagtcgtagtacgagacgaagtactcgacagcgttgtcagggaagaacgccttgaactccgcatagagctgtgctgcgagggtcttattgtggctaagtacaagggtgggcttgccgaggcgggcgatgacgttggccgcggtgaacgtcttccccgagcctgtgaccccgaggagcgtctggaagggaacacccgactcgaagccgtggacgagttcgtcgatggcctgcggttggtctcccgtggggcggaagcgtgaggtgagcttgaaggacatggatggagcgatagaggggatatagtgagtgggtcgcctccacccccagcagcgggtgatggagatgacccactgctggggacttggatggatccgaggggagggcgattacttcgcctgatggacggtgagctgtggaaaggggaagccgatgccggcagcgttgaactccttatagatacgctcgttgatatccaagaagacgtcccagtaggtctcgtttgccgtccaagcacggatgacaatgttcacgctgctggcaccgagagacaggagggcgatggtgtagtcgggggtcttgaggatgcgtgcgtcggactcgatgatgctgcgcaggaggttgcgagcgcggtcgaagtcctcattgtactcgataccgatggtccattcgacacggcggatattctcgtgcgagtagttgatgatgttgttgctgctgaggagaccgttggggatgaaggctgccttgttgtcgggcgtcagtacctcggtgtggaagaggcggacggccttgaccgtaccgtcagtaccctgcgacgagatgaagtcgccgagcttaaagggcttggtgacgatgatgatgaccccaccagccagattctgcagctggccactgagagccataccgactgccagacccatagaggccaggacagcggcgaaggatacggacttcacgccgaggacaccggccaagaagaggaagagggcgatgtacagtatcgcagtgaagaccgaatcaaggagtgagacggctactccctcgatattgcggcggcggaggatcccgttgaagatcttctttaggcgggtgatgacgaccttaccgagccagaagagcacgagcacgaggatgacgcgcagcccgaagttgataccagcattgagccactcctcgagcatgctccggctgaaccagtgcttgatgtcgaggttgaggggctgcgtagcagctccgatggcttccttgagctccgagcctgcagccgagtcagctggtagtatctgtgcgaagaaaagagggttcataaggagaataagttagaatttggatattagtcgatatataggatggcttagctatgcgaggttctgctgcctacgctcctcccgagtgcggtgtctccagcgcaggaagaagtagagcatggtgagccccttgagtatggaggagatggagatcgcccaccagacagctcggataccccagccccacgaggcgaagagcaggaccatcgggatgcgtaggtacgtgccgacgatactaaccgctgcggggaggtacgtgcgtccgagcccgtagaagagcccttcggcggtgatctccagcatcataaaggcctgcgagagcccgacgataccgaggtagaccgcacctgccttgtaggcggcttcctcggggacgatgagggcgaagatctcctcaccccagaagacgaagaggaacgtccccagtacgccgatgatgagcgtgaagctcagggctcggcagaaggccgtatagacgcggcggagcttaccagcggcgaagttctgcccgacgatagtcgtcagggcttcggtgacgcccgaggcggtgttccacgtcagcgactcgatctgcgcacccgtcgtcatcgtcgccacgccgatatgcccaccgagagtggatacctgacgtccgatatagatgctgacgaaagcaaagagtacctgcagcgaagcagggggcacgccgatctgtaggatgcgtcgtatctgagtccagtgcagtcggacgaggaaagggaagcccccgaagagcttgtcacgcttcacctgatagaggaagagcaggagcaccaagccttggctcacgacggtcgccagtgccgcacccgacaccccccagccgagggtgaagatgaagagcgggtcaaggagcatattcgtcgccagcccgaggatggagatacggaagggcgtacggctatcgccgatcgcattgtagatacccgtgaaggaggcggtgaggtagatgctggggaagcctacgagcgagaggtagaggtagctcaagccctcggctcgtacgctcgggatgagcgcatagagatccaggagattgcctgcaaagagcaggtagatcgccagcatccccacgctcaggaggaggctcatgcagacgttctgcgaggcatagctcttggcttcgtcacgacgaccagcaccgataccctgcgagatcgtcacttcgctcccgatcttattgatgagtgcgaaggaggcagctatccagaggaagacggaggccgcacccaccgctgctaaggcctgcgagctcagtcgccccagccaaatcatatcggtgatgttgtaggcgatctgcacgaagctcgtccccatgatcggcagggcgatgcggtagaggtggcttgagaggtcgccttgggtgaggtctcttatcttgtcttgcattgggggcgttacgggggttatcgctgagggtggagctcggtgagcttgttgtacttcatgcgccaagcgtagtcctgcaggtaggccttcaggcggagaagcatcgtggggagaggcgtcccaggctggtccttgatgttgtggagctgctggggatcggtcttgaggttgtagagggctgtgactttctgcccgtcgaagtgcagggcgtagtccccctcgatcatctggtagatgccgtccatatcctgcacgacgaagcgggggcgtgtcgtgtcgaaggggctaccaccgaaggtcaccatcggcttgtcatccccgacgaggtcgaggatcgtggggagtaggtcggcttgggaggcgaggtgctccgtatcacggccgacgagttcgcctcgtgggtcgaagatgatgatagggatgcggaaggcacccgtcgagttcttgtactggggcagcgcacctggcacggcgtggtcagcgacgatcacgaagagggtattgtcataccaaggctgcttgctcgctgtctcgaagaacttccgcagcgccatatccgtgtaggctacggcttggtgcatagggatcgtacccttgggtaagaccttctgatactcctcgggcacacggaaggggtggtgcgaggagagcgtgaactccgccgcgaagaagggctgacgaagcgagccgatctggcgagctacgtactggaggaacttctcatcccagataccccagttgccgtcgtagtcagcatcattggcgtactccgtcttaccatagtattccttgacgcctgcctgcattacgaaggcattgaagcccatagagccgttcggcgcaccgtggaagaaggccgtcgagtagcccatcgagtcaaggcgtgcgggtagagccgtgatgttgttccccgagtagatcgataggacgaaggggacgtggggcttgaggaccgaggcgaagatcgcaggcatcgcatcgatggacttctgactattggagtagccgttggtgaagacataggagcgctgcatcagcgagtcgatgaagggcgtgaagccttggtaacccgggatatcttggttgagcccgccgacccattcgcgtgcgaagctctcccagatgatgaggacgacattgcgccccttgtacttccctgagacaggtgtcgagccaggggtgtagacagagttgaagtacttcggtacctcggcgaagggcatatattggtactctggcaggcttgacttgccgatggtgcggatgaggctgaagggggtgttcagcaccagcgcacgctgctgaggacggcggatatagatgttcgcattgctcagtgtgatggggcgggtctcactggtgaagccaccgcgcccagcgacgatggagaggtagatactcccgccgaggaggatcagtgacgtgaggtagaaggcccacatacggcccgtgggacgctgcttaggacgggggaacttcccctcgatgatacagaagagaatgataagtccgatccctaagagcgttatcccccaatagtccacgaagaagcggaggaactggaatggattctcacctccgaactcttcgaagaccgccagcgtcgtacgcttcagtgtgaagcgatagtagacgacgtcaccgaggttcagtatgatagccagactcgtgacgatgcgatagagccccgtcagcatacgctggtagccacggctgtaggcctgtggtagggggaggaagcttagtgtcgtcaacagcaggctcgtgtagacgatagcgctgaggtcgaagcgcaggccgccccagaacatcagggcgagctgaccagccgagccgatctctaagagatcctgattgtataggcagaatatccctcggcagatgctgtaaatgacgaaggagaggaggaagcgcaggaggagaagtcggacctgagcgccgagcggcgtgagggccgaagacgtagacgaggaggtcatcggtaattactatgtatctatttggctacaaaggtacaaatcttagtccaagcaactggggatcgtgcttgcaaggtgaagcccttgcttgccccttcctaatgcctattcttactccgttagttagatggggtgcttctctgcctgcagaagtgacgtccataagagggggtagtatgaactactactggtccgcagtcaaaccagtactggtcactactacgaaccactactggtctgcgcgtgaaccactactggttcgctcgcgaagcactactggtccgaccacgcaccaatagtggtttacatcacctctctataataggatagctcgcttcactattgaggagcatagcaaagaaatgtggcgatgagaccgaagtcccaccgccacacatcacacacacacatgcatatacactgaaaatacactctctaatacactactactttcttagaatgggggtggtcctggagggccctgacgcttcatatcgctcttgctaccgccaccgctgaagctatcgaagcggtagatgaagtggagcatagcgtagcggccgagcgtgttggactcttcgatggtgctggacatcgccgtgatgctttggtagatgctgcgacggctattcaagaggtcgtagcccttgaggcggatggtcgccttcttcccagcgaggaagctataggagagaccagcgttcagcaggacctgatcctgattgtagccagcggcgtagccacgtgaggtggtgtaggtcgcttcaccctcgaaggcaaagcccagcggcagggtgatattggtcgtatagccgagcgagtagtccttcgtcgcgggtgtgacggctgaggtcagcgtattcgaggcgttgtagtagccgaagcctcccttgagggtcatatcgatgcccgtgatgcggtagttcagaccgagctcctcacgtaggcggagggagaggctacggttcttgtcaccgttgatataagtattgctacgagccaggtcgttgaaggaagctacgcggatggagaacttcttcccagggagggtctgtgtgaggaagccaccgatgccgaccgaggcattgccgtctacgttggtatagtcgatggtgcgcttacccgtcgtgacatcatagagtgagcgctggatgatatcattctgtacgacctgagcacgaccgaagacggagagcgacgtctgcgtcttcgtccagtacttgctgaagcgcccgaagaggttgtgctggaagcctgggagcaggtcctgattcccgacgtaggagatgaggggattcgtcacatcctgtacgggggagagctgctcgttggtaggggcgaagctacgaccgaagtagtcgagacgaagctccgtgccacgctgaggcttgtagctcatacgcagggtaggggagaagttcagcgtcgtgcgggagataggagtagccgtgataccgccgacgacggagtggctgctgatgctcgaagactcgaggttgaccccagcggtcacatcgtaggtcttgcccttcttcttcagtgcgatacctgcctgatgcgtgaggtactctgagcggaactcattgctgtacgtcgcgttgtgcaccgtgtaggctcccgtgaggtcggtgtcgaaggcgtcgcgtgagctattgctctgtgagcccttgatctggtaggtgagctgcgtgaagtagcccttgccgagaggctctacccagccgaggcgtgcctgatagttcgtgctacgcgtacggctgtcgatgcgctggtcgacggactgattcgtcgtcgaagtgcggtcgaagagattgtagaggtacttcccctcgcccgtctcatcttcgataccgaagcgcgtggagagcgtgagggtacggcctgcggcactcagacgacggctaccatcgaggcgcagagtcccgttgatattcttctgtagggtgttctgcgtgaggtcgctggagttgatcagcgtgctcgtggcatcctcgagggtcttcgtcgtggaggtgtaggagccttgactgcggccgtagcggagctcgggggagacgatgatctccgtcaggctgtcgggcttccactccatgcggatgttcgctccgtaggagtccttgtcgctacgctccgtgctcttgcctgtctccgtcgtcgagcctgtggagaggtagttctgctgccagctgtccgtgatcttattggtggtgttgcgaccgccgaggacgttggcattgagctggagcttcgaggagagcgtctgattgaggttgccgccgagcattcttgaggtcaggataccgttggcatcacggcggggcataccgccaccccctctgttgccacgacgacctgcacccatgcccatcatgaagccgagctgattgccgtcttggctgatgtcggtgaagccagcgttgttcgtattgttgagactcccgatgatggagaactgattgtcgtcagcgaagcggctgagggttaggttcgcttcgtagcgcttgctcgtacctgcaccagcgtaggccgtaccgaagagtcccttcttcttccccgccttgatggtgaggttgatgacggtctcttcattgccgtcggagaagcccgagaggcgggctgcttcactatcgcggtcgaggacctgtaccttctcgacgacttcggcggggaggttgttggctgctaccttcgggtcaccctcgaagaagcgcttgccgtcgaccatgatctgcttgacggtcttcccgttgatggtgatattgccgttctcatcgatgctggctccagggagcttcttgatgaggtcagcgacgaccgccccttggttcgtggtgaagttgccggcgtggaattcgatcgtgtcacccttgatgacgacgtcgctggtcttcccgacgaccttcaccccttcgaggacttcgccctcagcttggagggtgatggtgggcagcgtgagagactgcttctcgagacggatgggggtggtgtgggtcttgtacccgacgtaggagacgcgcagggtgtagcttcctgcagcgattcccttgaggtggaaggcgccgtccttggcggtgatggcacctgtcttgagcttgccgtcactctggaggaggctcacgctggcgccgaggagtgcttcactcttctcgtcgagggcacggcccgtgatcgtgtataatgagtcctgtgcgcgcaggcctgcaggcaggccgagcagtagaagtaggaagctcataaggccgatgatggagcggctacggagtctattcataaatgctgtattctagagtacgagctggagggcgcgtttaatcgtagcgtaaattttttgaaaaggacttgtagatcgctccaaaagcagtgcaggcccccgctccagagagcgggggcctgcggcgttatggactaaagatagggtggggttacttcgccgagcggatgcgatcgtcgaaggcggtcagtgctgccttcgcgccttcgcccatagcgatgacgatctgcttgtagggcaccgtcgtgcagtcgccagcggcatagatgccggggacagaggtgcggcagcgctcgtcgatgacgatctcgccacggcgcagctcgaccagctcctcgaagggcttggtgttggctgcgagaccgatctgtacgaagaggccatcgagggcgatcgtctcttcgtcgccgccatcacgtggagcgatggtgaggcccgtgaccttcgtgccatcaccgaggacggccgtcgtagctacagccttgcgtacggtgacgttgggcaacgtggcgagcttctcctgcaggacgatgtcggcacgcagggtgtccatatactcgaggacgacgacgctgcggcagataccagccaggtcgatagctgcctcgataccggagttcccaccgccgatgacagcgatgtccttgtccttgaagaaggggccatcacagtgggggcagaaggcgacaccacgaccgatgtattcggcttcgccagggacgccgagcttgcgccaagaggcacccgtagcgaggatgatctgaggggcggagagctcttcgccgaggttcgtcttcaccagcttcgtctcaccatcgatgacggcttcgacgcggcggttgtcgaggaggtcgatatgatagatctccgcatgcttgcgcaggtcagcagcgagctgcgtacccgtcgtggcgctgacggaggggatgttttcgatacccgtagtctcgttcacctgaccaccgatgcgctcagcgacgacggcgacgtggagtcccttacgtgcggagtagatagccgaagcgatacctgagggaccgccaccgacgacgatgaggtcgtagctacggcggataggctcagcggagacgggctcggcgccgatcttctcttcgagggcagcgaggagatcaccgagggaagccttaccgatatgtacgagcgtgtcgccagcgtagacggcggggacagagctgatgttgcgggcgttcacttcgtcctgaaagagtgcgccgtcgaccatctcgtgctcgaggccttcgttgtagagtgccatgacgttcagcgcctggacgacttcggggcaattagtacagctgagcgaagcgtaggtcgtgaggcgcagaggcgtcttcagcgcagtgatacggcggatgaagacctcttcggggaggttcttgccctgaccgtcagcattgaggacggcgaggatgagggaggtgaactcgtgaccgccagggatagcgcggaaggagatgcctgtagcctgcccatcacggaggatgctgaggcgaaggacatccgcgggacgtacctcgacggagatctgggggctggtgctggcgaagtcgcgtgccatcgtggcgagctcttcgctcttggcgtcgcctgcgttgtcgacgacgagggtatactggtgcttcaggttagcgaagagaccctgaagctgagtgatgatattctgatcgagctgcataagagtaagtcgaatgagtgaggaagtatatatggtatagacgaagcacgggggaggtagagtcgtgcagactctacctcccccgttttgtgttgagcccttgccttcgtgaaggtaagaccttcggctgggggtagaggtgcttcttagagcttaccgacgaggtcgatgctgggggtcagcgtagcgtcgccttccttccacttagcggggcagacctggcctgggtgttcgtggacgaacttagcagccttgaccttacggaggagttcgcttgcgtcacgaccgataccgttgtcgtggatctcagcgatcttcagctcgccatcggggttgaagaggaaggtaccacggtaagcctgaccagactcttcgccgaggacgccgagggcagccgacagctcgaaggtcatatcagcgagcatcgtgtactcgatcttgcggatcgtctcggtagcgtcagcccatgccttgtggacgaagtgagagtcggtgctgacggagtagatgtctacgccgagagcctggaactcagcatagtggtctgcgaggtcagcaagttcggtggggcaaacgaaggtgaagtcaccagggtagaagaagaggatgctccacttacccttgaggtcttcgttagaaacttggatgaaacccttgtccttgcggtaagcgttaaccttgaactcggggagctggctgttgatgtaacacataatctataactgaatttcttgaaagtgtgatgaagcgcaccacgggggtgctctcgatttgtgatgcaaaggtagcccaaccttttacagcctccaattcgccccatatatatcggtataaataaaatagataattctgtattgcgctccactctcggaggggctttctcccgctctatacaggggggctgaacctatattggtcgctgagctgacctatatagatcgacgcgccgaccaatataggtcacgatgccgacctctattagattgttgctctgtgtagggataaaagttgcggacgagcggtagataagtttggactacgtacgtggctctaatatctacgtacgtggatatttggactgacgtgcctggtctttaaatctacgtgcgtagacagaggaaaaccactacgtgaaggtgctttttccttcgcgagaacgatgctttttcctccactggataagaggaatacgcgcgataaagcgaagggcttgtgtatctcttcggagaggcatatcgtggagctgggcgtgcgatgccttagcagaataaatagagagtagggctctatgcaacagttttatatattatggagtgtctcttcttcgtggctcgtcgtgcgcctcattgaggtggtgcaagtggtgtgatgaatgtgggcttcaggcgcgtctttagaggggtaattggctgtgctatgggcgggtggggtaggagatacaataaattatgtctatatttgcagtccattagcgctcctacggttaccaacccagcagcttcggctgcagcgataaagtagaacaaattataacgttataacgataatgaagaaaggaattcatccagagaactaccgtcctgtagtatttaaggacatgtctaacgaagacattttcatcacgcgctcgacgatgcccgctaaggaaacgatcgtcgtagacggagtagagtaccctctgatcaaggtggaaatctccagcacgtcgcaccccttctttactggtaaggctaagctcgtcgacacggctggtcgtgtggacaagttcatgagccgctacggcaaccgcaagaagtagtcgtcgactcggacaaagctctcgctggtgacgtgaagtacaagcgtccccaagagtgcccaaaatacaagaggtcatctccctgcaacggggagatgacctctcttcttatctatctgtgcttaggctggatagcttgtgtgggggcgtgcctcttgagagatgattaagtcattcagtatgataccccttccgtgtatcataaaaatgttatcttcgtgatcacaaatagatatcaaagctagagtatatgaagacaagactctcagcgttggcccttgcactcctcctgggtggaggtatggcctcagcgcagaaaatcttggtcacagggcgcgtcactaatgcttcgaatgcggtgctccctaaagtccaagtcgtcgtaaaggagactggtcgcagcatgacaactaccgagcaaggactctacgtcatcgagctcgagtcgggccagacccttcagttcatcctcaacggtaaggtcctcaagactgtcgtggcgaatcagccacaggtggatgtggagctcccagtgcaagccccagagcaggggaagcctaaggccgacaccaccgctacgcactcgggcgacgggaaggatgatgtgatcctctcgacctcgagccgtggggctacctcgatcacggggaaggctcgcccactgtgggtgctcaatggcgtcgtcctcggtagcgactacggtagcctggagtccttcgctggggctgaccccaagcaggtcgctgcaggtctcgtgccaggtctgagtgctgagaacatcgcctcggtgcgcatcctcaccacctcatcggagacctcaagctacggcccacgtggtatcgctggggtcgtggagatcacgacgaagtctggctctgctggtgtctcttcccttagctatcgcggggaatatatctaccgccccatccccacgtacaacgacctgaacgtgatgaactcccagcagcacgtggccctcatccaggacctgctcgacgggggtatgtatccgatccacacgctggagacgtctaaggaccaggggctcatcggccgtatgtaccagctcttcaacgagctcgacgaatcgggtaagccccgtctgtccaatgatgaggcctcacgtctggcttacttccgcgccgctgagcgtgcgaataccaactggttcaagcagctctaccgtaataccatcgtccacaaccatacgctgagcttcaacggcggaacgaataagacgaacctcttcgcctcgctcaccgctcgcgtcgacccagggtggaccatcggcagccgtgccaatacctactcgggtagtatgagtgcggactacaagctcctgcctacgctgaagatcgggctgaatatcatcggggagtacaacacctccgaagagcctgctacctcagcagtcaagtacgccaatacgacgagccgcgcactgctccccacggagagctatacgaaggactacgtctcctacaatatcttcgacgagctccgtgagagccgccgcacccgcactcagggttatctgggtatccagggtactgccacgtgggatatcctcaagcagctgcgtgctaccttcgtcaccgacgtcaagtacaccaatacggtgaccttcctcgataacaccgagcactccgtcttggcccgtagtatgcgcgctatgcagacgaccaacgtacgcaacaataataagaacctgcgtaccgaccccaacgacccctacgcacttccttactccgtactccccgagggcggtatccgtgaaagccgcgtcgtacagaactatgtgaatagcttcaagttcgacctcgactatcaccagaccttcggcaagcacaacgtcctcgctgctgctggtatggagctcaatcaggggaatgtccagaacaactggaacatcaactacggtgtcctctacgacctgggctaccactcctactacctccccgacgctatccagcgcctctatgagcaggggaaggactactacaccatccgcaataaggtcaataacaacctcggcttcctcactcgcgccagctatacctacgacgaccgctactccatcgacgctctgctgcgcttcgacgccagcaaccgcttcggtccctcgcgctatgtccgctggctccccacgtggaatgtggagctgacttggggtgtcgatcgtgagagcttcttccgtcatctgaagcccctctcctcgatgcgcctgaagacttacgtcgggcttgtcgcagacaacccctccgtcaccaactccctcgaggagatctatcctaatatcccctggcgccccagctcgaaggaaatcgctctggcatatagcaacctcgctaaccacgacctgacctacgagaagacgatgacctatggtgcacgcctcggcttcggcctcttcaagggccgtatctcggctgagatcgatgcctaccgtcgccgtagctatgacctcgtcggtcctatctacacgcagtcgctcggtggtgtcgcacagaaggatggtaacgtggcggagctgaagtcttcgggtctgcagttcaccctctcgacggtgaacttcaagacgaagaccttcagctggacgacgggcttctcttacctccacaagacgaataagatcacctcgctcctgagtagccccacggtccgtacgatggtctcgggctctggcttctcttacgaaggctatccactctcctccgtcttctccatccccttcctcggtctgacgaacgaaggtatgcctcgcttctacaacgagcgtggggtagagacgctcggcgacttcaacttctcgagcagcaatatcaacttcctcaagtacagcggtacgcttgacccaacggatgtcggtacgctgaccaataccttccgctataagaacttcaccttctcggcgaatatcaactatgagttcggcgctgtgacgcgtctgcgtagcatctccaacacggacgactactcagccttcccacgtgagctgactcagcgctggaagaagcctggtgacgaggcctacacggatatccctcgtatccccaccagctacgccttcgaccagtacggggcggacaacctcatcaacggcttctatgcctacagtgcctccacggcgcgtatcgtcagcgcagacctcgtacgcctcaaggagatctctatggagtacacggtctcgaagaccctcctgcgtcgcacaccgctgaagaacctcgcggtgaagctgcaggcccagaaccttatgctcctctattcggatgctcgtctacgtggcgatgaccctgcttatatgtacagctcttcggtcaccgctcctaagaagctcatcctcaccctgcgtgtcggactctaagcgagatactattatgatgaatagactcttcgtgcccctcgtggccctcgtggctcccctcgtcctcggatcttgcaacaagctcctcgatgagctacccgacgaacgtgtgcagcttgatactcctgagaagatccgcctggcactgtccaacgcttatcctatcacctccttcgcctacgcctgtgagatgtctacggataatgtcgatgactacgggacggacaacccgaacttcacgaagttcacctacgacctcgtctactggaatgacggccctgagtacaaccaatccgatggtatgcgtgccctgtggcgtgcccactacctcgctatccagcacgccaatgctgcactggaggctatcgacaagctcggcggaggtacagagctcaacccccacaagggggaggcgctcgtggctcgtgcgtactcgcacttcgtcctggtgaatctcttcggtaagcactacaatacctctaccagctccaccgacttaggcgtaccctatatgacggcccctgaagtgacgctgaatccccagtacacgcgtaataccgtcgctgaggtctatgcagctatcgataaggacctcaccgaagggcttcccctcatctcggatagctactacaagcagaaggcctaccacttcaataaggccgctgccgaagcgttcgccgctcgcttctacctctactatgagcagtgggacaaggcgatcgagcacgctacgaaggcgctcgacgggaaggcgcctcgccgctggtcagacttccaggtcgccagcatcgtcggtgctaagacggaggatgcttacgctaagctcttcactcgtgagtcggtcacggcgaacttcctcctgcagcccgtcgcctccaatgcggtcgactacttctcctacgctcagatgaagcgcttctctatgacgcaccgcacggctgaagaagtcttcatcggtgagaatatctggcgcagctccacgacaccgcaggccgactactggcaggtacccttcgtgtcgtcctcgtacaactaccgtgacgtcatcaaccagtcgaagtacccctactacgcaagtaagaaggggaacacgctcgtcgtgcccttcaccgctgaagagaccctcctggtacgtgccgaagctgagatcatcaagaagcagtacgatgctgctgtcaccgacctcaacacgtggacggctgcctacctcaatacgaccaagaataccttcacgaaggatgagatcatcgccttctataaggctctggactataactccgccacagctcctacgatgaagaagaagctacatccctccttcaccctcgatgggggcgaagatcaggagatgctccttcaccacctcctgcagtgccgccgcgtagctacggctcacgaagggctgcgctggttcgacatccgccgctatggcatcgaggtctaccgcttcgtccacgacacgaaggaccgcgcgaagtacaccgtagctaagaccctcacctcgggcgatgagcatacgaccttccagatcccgcagaacgtccgcaacgctggcctcgaagctactccccgcacaagtaactaatcctcaagctcgcctcatcgcgccacactatgaatatgactctaaggaaagcctccctgtgggcccttgctgctctcacgatggccctcggcagctgccgcaaagtggatgcagatattagctcgacctccgtactcaatgcctctgctaaccgcacggcaatggacgagtacatcgagcgcgaagtcacctcaccctacaacatccagatctactatcgctataccgagagtgagatcggccgtaactgggtgacctcccccgccaacgagtacaacagccttcagttcgtcaacgtcctcaagtacctcttcctcgagccttataccgaggtgatgggtgtggactttgtacgccgcttcacgccacaggccttcgtacttacgggcctcttggcctacaacccaccgcccagcaactcgaatacgcgtgcttcgacggtcaatggggtcaagatcatctttatgaacatcaatagcttcgacttcccttcgctcaagcagtactaccacacgctggatagtctgaagactgtgctggagaccgatacctccgtgcaggcagagtatgatcagtggaagacttggctggatggccagaactctacctacctcgagcgcttgaaggacgtctacctccgtacgatgtaccacgaggcagcgcataccttccaccagagagtcgagcccacgacggacttcgacaagatcacctcgctcgactaccgtcaggccgactggatctccggctggacgcgtgaagggaagaagtccatcgagtatggcttcatcaccaactatgccagccaagagcctcacgaagacttcgctgagctcttcgggaactatgtcatccttagtgccgatgagtgggaggccaagctcgtctctgctgacgtgatccccgcagggcgcacccgatcggggcgctccatcattgaggagaagatcaccatcatcaaggactatatgctcaatacctgggggctcgatatggataagctccgtgcgcagctgcacgctcgctatcccaacttcgctcgtcaggacttcactacaatgacctcatccacgacacagcaatgaactatacgaagatcttcgccctcgctacgggcgctctcctttggatgagctcttgcaccagctccagcgatcttgataagctccccgatgctgccgtccgcactcaggaggcgatcagtgagacggtctccaagctcgagggacacgatggctactggcgcctcacttactaccccgacacgaagcgtgcctacgggggatactcgatgtatgtccagttcaaggacggtcgtgtcacggcgctctccgagctctcgacgacctctacgaactcaacctattcggtgaagaacatcgatatgcccacgcttaccttcgatacgcgtagcaatgtcctccatcacttcatcacctctaccgagtacttccgtaatgcgcgtggcggtgacttcgagctcctcctaatggggcagcgtggcgacagcatcctcctgcagggtcgcaagtaccgcaatcagatgagcctcgtcccgatgacgacagaccctgcgacggagatcgcagcgctgcaggctatggctacgaagttccaggggaagaactttgctcccatctccatcggtacggctggctcggtatccttccgcttgaatcccacctaccgccagctggagtacacgtccacgagtggagagacgacgaccacgcagaagatggcctttgcctacacgactgatggccttcgcttctatgagccgatcaccatcggtggggtcacgatctcgggcttccgcctcagcagtgacggcacgagcgtcacgtctatcgagggcgatgtcaccacaacggtggtctcgctccctattgatctcgtgaacaagagctatgtcgcttacctcaaggccgactcggctgcggatgacttagtctccttcttcacgcgtgtcaataataccctctaccgcaatcgcaaggctcgtatgtcggctcgcacctacttcggtgtgaataccgctgccgaccagacggcaggccttgtggggaatgacacgaagatcgccagcttcctcacgatgcccatctatgagcagaccaacggtagctacacgcgtctctcctacgaggtagactttgtgcctgtcggggatgatcccacgcaggtcgatatcatcgctcgcgatgggaatgagtcgacgtggtggtactggtatgcctcggctgccgaatattgggtgagccgcctcgctacgcgtgcgccctataccgtcgagacgctgacggatgccgcaggtgctacctactacaagctcaccagcgtgaagtatgctgataaggcgtggttctacctctacgaggtccagtagcccgctctgtccagtagctatatacgaagaccgcccgaagcacgctgagtgcttcgggcggtctttttatgtgcttacgcgtggagtgcgtcgagcttagaggtcttcgtagaggcgtacccacccatggttgtcgggatagtcgccatactggatagctctcaggcgctcgtagagggcggtgcagataggacctgggttgccgtccttgctgatgacgtagctcttgtcttcgtcgaggtcatctacgcgcaggatagggctgatgacagctgccgtaccgcaggcacctgcttcgtcgaaggtagcgagctcttcgacatggacggggcggcattcgaccgtgaggcccatatcttcggccagctgcatgaggctcttgtttgtgatcgagggcaggatcgaagggctcttaggggtgatgtagctcttgccacggatcccgaagaagttcgcaggcccacactcatcgatgtagagcttctccttagcatcgaggtagatgacggctgagtagcccttgtcgtgggcgaggacgcctgagcgaaggctggcagcgtagttccccccgaccttgtactgcccagtcccgaggggcgcagcgcggtcgtagccacgcatgatagccatggggctggggcggaagcccgacttgaagtaagcacctacgggcgtgacgaacatgaggaacatgtattcgctcgcggggctgacgccgacctgcttgccgagcccgatcatcaagggacggatatagagtgatgcgccgctctcgtagggagggatgaagtccttattgaggcggaggaccatgtcgagggcttcgaggaagcgctcggtgggtagctcgggcatcaggatgcctcggctagtgtgctgcatgcgggcagcgttctcctcagggcggaagacgcgtaccttaccatccttcccgcggaaggccttcagaccttcgaaggactcctgcccgtagtgaaggcaggtcgaggccatggggatggtgatcatgtctgaggaggatacttcccattcgccccactggccattgcgatagtagcaacgtacattatagtctgtggggtggtagccgaacccgaggttcttccagtccagctgttgtccgctttccattgtagttctttttagaggtggtcgattattcgaaatctcattgggctccactggagggagccataggcaaagatagagaaaagtgcttatctccgatagtaagcccttcgcccgctcttctcctacctatataatagagagataggggagtgggaatgcccccttcttcctcgtatagagtcgtgctgcgcccctcgggagaaaaagtcttgactactacgagataaacccgcctacctctactctaataagctcaaccacgtacgtagtcctaatatctacgtgcgtggtcctatagattctcgtgcctggatttaatgtccacgtacctggatcaaggaataccaccgctcggcgtgctttcttcgtatatggcttcggtagcttttctcctcatctcgcgaggaaaagcactatatggatgggggcgctttaggcattgaaacaaaggcgaatgtcagccgatcggtagtgggaactttcgcccaatcgttggggagatttggtagtatgaaagatgtgtactatctttgcactgcaattcgagagctacgaagcgacaaggaagtgtgggtgagtggctgaaaccagcagtttgctaaactgccgtacgggcaaccgtaccacgagttcgaatctcgtcgcttccgctgttagagttgctaagacttatgatggtgccatagctcagttggtagagcaaaggactgaaaatccttgtgtccccggttcgattcctggtggcaccacaaagaagaagagaggtattgcgacgcagcagcgtgtgatacctctctttttgtttttccctcctgtcctctttctttctcatctatgagtacgtcctccacagcttctgcacccgcgcgagctccacgctcatcgaatatagagctactgcgtatcgtagcgatgctctttattatgtttggccacctgagtcgagagggtggggctgggctcccctctgctgacttcctccattctgttcccttcttaggcgggctgggtgtttggtttcgtatgatgaatctcacaggggtagatatcttcgtcctgatttcaggctactttgccattcggcctcgggtgaactcagtcgtctccctcttctttcaagggatcttctattctgtcgggatgtatgcgttctgggtgctaacgaagcaagcggacttctctctgggagagctgtcgatgcacctcaagcccatgaaagtctattggttctttggtagctatgtgtggctggtactcctagctcctgtgctgaaccgctatgtggagagcgcaacgaagcgtgagttcgggctgttccttgctgtttactatttctttgcctgtggcatggagtggtggatgagcgcatcatctgagctgcagagaggatactctgtcttagccttcattgggctgtatcttttagctcgctacgtgcgacttcatggtggtcgctggtgtgagctggctccacgatatgaccttctgatattcctggggtcaaccgctctatccgcattgcttgccctcgtcctcttctggggtatggggcgtcccttggtgggggatgatcctcttgttgaccgactcgttagctatacctcgcccctatgtattgttgcctcgctctcgcttctcctctttttcagtaagatcaagctggggtatattcgctgggtcaactggctcgcagcctcctccttctccgtctaccttctgcatgaggagtatttgacacgtgaccgctatcttgctctcgcagattatgtgggacagcactatgcggtactcgttggtgtcctcctcctggtggcttttgttccggggctttatttcgccacgacacttgttgatcaggtgcgtcagcagctttggaagaagctcttttcttcttggctcgatcgactggaaagcgctgtcgtcaataggctgaggtcgtgaggcttttgcccttaatttatctgtatctttgtggaaaaagatagggcatacttttgcccataacgatatatgcgcagtatgaagattgcttattgtctctttggtacctactctactggtggtattgagcgtgttacgacggttaaggctaattggcttgcagagcatgggtacgaggtgtatcttgtgacgacaggtcatgccggccgcccatcttactatccattgcatccagctatcaagcatattgacttgggtatttgctatgacgagccaggtgttctctctcgtttttctgtttatctccgtaatcagccgaagtatcgcaagcataaggaagagctagagaagctctttgccgagattcgccctgatatagcaatagcagctggctggcatgaggcttcgttcctttttcagctgaaggacgggagtaagaagattattgaacatcactcttatcgctatcagaatattgcgatttatcctctgtttctaaagcagcttagccgtgtgacgccagtcattcgatttaagtattggctgcgtacggtgtggggtaatttgatgacctataagcagggatgctatgataaaaagtttgatcaactagttgtccttacagaggaggataaggcttattgttcgcactgtcctacggcggtggctattcctaaccctctgaccttcgagcctgctggcaagagcgacttgtcggggaaggtgatccttggagttggtcgtttgagtaatgagaagaacttcacagagcttatagatgtttgggcgctgatcgccaaagattaccccgactggaagctgcgtatcgtgggtgaaggctatacggatacgcgcatcctgcagaaggtcaaggagtacgggctggaggatcagtttgagctgtgcccctttacaaaggagattcagaagtactacttgtcagcctctgtatatgtcatgacctctgcttttgaaggcttacctctagtcctcgttgaggcggagtcgatgggccttccccttgtctcttatgcttgtccctgtggcccacgtgatatcattacggagggtaaggatggcttccttgtggagccaggggatcagaagaccttcgctacacgcctgaggacgcttattgaggatgaagacctccgtcatcagatgggacaggctgcaaagctcaactccgagcgcttctccctcgataatgtcatgaagcagtgggaagctctctttaccgaactgaccgctaagtaaagtccattcgataatcaccatatcctccacccatgaatatacagcagctcgagtatatacaggccttggataagttccgccactttgggcgggccgccgacttttgtcaagttacccagccgacgctcagcacgatgatccagaagctcgaggatgagctcggcgtcaagatcttcgaccgtagccaccagcccatcatcccgacggcagtcggacgtcgcatcctcgatcaagccgcggttatccttctgcaggtcgcacaggtcaaggaagttattcgcgaggagcaagaggcactcacgggggcgcttcgcctcggcgtcttgccgactatcgcaccctatctcctgccactcgtcctgccgctgctgcgcaagcatctccccgatctgaagatcacgatcacggagctcaagaccagcgagtgcgtcgccagcctgctctcagggcagatcgatgtcgcgctgatcgcctcggcatcggaagatgagttgcttgttgatcgtcagctcttcttcgaggaattccttggctatgtgcctcgtcgctccgagctctttgaggagacgtcgatccgctcggccgaagtcagtcgctaccagctttggctcttggacgaagggcactgcttccgcgaccagctcgtgaagttctgccacttgaagaatgcccccaatcaacgcttcagttatagccgtgggagcctggagacgtttatgcacttcgtcgagcagggcaatggcgtgacgttcgtgcctgagctggcggcgaagacgctgagtgccgagcagagcgaactcatccgcccctttgcgctgcctcgtcctgcacgctgcgtcacgctggtgcaccaccgcgactacgtgcgtcacgccgtcgtcgaccgcctgagcgaggtgatctgccaagccgtccccaaggagatgcttcgtctccgccccggccaagacctcgtctaagtgaagccaagtcccaccccatataagcagggagcatacagccggtgtgctgtgtgctccccgctttttttgcgtgtagagtgtgacttgcctatgataagtgtattagtgaatggtgagatttcgttccactttcggagctctactttggtatgatcatatataatgtacgcgcgcgaattggtcggaaaactgccttgtcgtcgtatgaatttgcgtgcttatttggaagtttgggtgatttttccctacctttgcactcgcaaaagaaacgaacggccttgcggtgacgcaggtagtttgactttaagagatctttgagataattgatattgacaaacagaagtgtagtaacaaacgtttagggaaaagaagacctaaccgtcaattacgacctttacttaggtagagatacactaataaatctgaagcaagaatcatttttagagcaagacaaacagaacaaagtacaataaaatattgacaatgaagagttt

SEQ ID NO: 76 - DNA, 63600 bp, Porphyromonas bobii
  source 1..63600: mol_type = genomic DNA
gcatacacagaatatcttggaggctatggcatacaatctgaagcgtatgcctaggcttcttgtgctccagagcaccaaatagcccagaaaagccccctctcgggaggatgatcctcccgggaagggggcaagggggaggtgcaggtatcccacttctcagcctaaagatcccaattttcgaggcaagaaggtgcaagctgtgaagagatggccttgcgcaatggtctccatatatttgccccgtaatagtattgttaattccacgttagcgatgcgataccgaaacacctactcaagcccacttggtagctcatgctatgtactgagtctactggtctccctctggaaggggggagtggggttactcggccttatcggcctcagccttaccctcggggcacagagctccatcaagatccgaggggtcgtccactcaggcaaggagccactccctagagtctctatcaccctcctctccgtgacagatagtaccatccttagctacgcccatacggatgctggagggcagtttgagctcactgcaagcggccagctcactcaggctattgtgtcggctcgctgcctcggctacaagacctatacccagcgtctcacactccccacggcgcacgagctagatattgatctcaaggaggatacctatctcctcaaggaagtctccgtgcaagctccacgggtctggggaaaccaagataccatcaactataatgtcgctcgtctagcgaaggccactgaccgcagtatcggggatgtcatccgccgtatcccaggtatgcgtatggagggaggcctgctcaagtaccaaggcaagcccctaaagcaaatcaatatcgaggggatcgatctgacccaggggggctatgagctgatcacgagcaatatagacgcgagcgacatctccaccatacaggtgctggataactaccagggcatcaaggcgctggtaggcaaacgctcctcggatgatgtcatcctcaacctcaagctctcgcccaagaagcgtgggatctggggtgtttcgcttgacttgggtcttggctatggtgatgggcttgagaccaatagccggatcaggagtaactaccttgcccggagagcgcagttcctcggcgtggcgtatgtcgataactcaggcaggcagtactacgagagctcctttggcgtgcagaggggtggctcgagggaggagcacatctttgcccgcatagataagcccgctacccccaacctccccccatcatactatacagacaatgtgtcgctgatggccagtggcaatagtgcctttgtcctctcggatagtagccagctcaagctgcaggggagctatcggtatgataagattcgctccgagggctcttcgcaggctcggtatggacgcccctcctccccgctcctcctagatgagcgcatcgagcatctactacggcaggggagcgcctcgaccagccttagctatgagaagaacttgcagggctactacctcaaggatcagcttcgtgcgagcgcctcgcagagtagggcctcggggacaatcgccctcaatggactagcaacccctcagcgtcaagggctagatgccctgcacctgaacaatcagatgcacttcatcaatggccgtacacgtctcccgatagagtttatcctcacccagcggcttacgacctcagacgaagactttgagacagccaataaccagcaactgcagcaggtgctccccacactacacagtatgatcgggcagcggggatggttcacaagtctctatacggacaatcgccttaggatcctcaacctcccccttgtgcgctactggacgtatagccctcaggtctttgcctcgtaccagtggcagagcctatcgagtagcctactggagcgcacgggcagtagctatgatcgtatcctgcgtgtaggtgtggagcagaccctaagctatctacgtcagaagtattccatagatctagctctccccgtcatctaccagctccgacggacaagctcggatcgtctagcaggcctcctcatcgagcctcatctcaaggtcaagctaagcttaggacagcactggggtctccagttggcaggtagctatgcacatacggagccgaggatccgtgattggtatcccgaccccgtcctagagagctatcgtagtctgacggtcgggacacctaggctattcagggagcaaacagccaccatagaggggcgggtagactaccgagacatcttttcgttcctgtcgtcctctctgagggcgaggcagagcatgcactacaagccctttatccagatgctactcctcggtgaggacggaggacgctatgagctcctagcgcacaagcaccatacacagaccttctcgggggtgtggtcgctgagcaagggatttacctggacaggcctagggatcgacctcgacctaggctatacacaccatctagggcaggtagcctatcaggggacgatcacgccctataaagtacatacccagagcgtgcgactagccctgaaggccaatcccatcaaggaaatcctcctggactacaatgtctactatgggcgtaactatacctcccgattcgcctctcgcaccgagatcgataacctcctctccgagaccgcacagataggagtagcctttgggaaaaacatattctgggatatcatcctagagcataatcatgtcagctcctccagcgaaaagaccgatgtcctactcctggacagccagctcaagtggagcggctctcgagtagaggtgggctgcgaactgaataatctgctgggcatgcaggcctatcacagcatccagcgcctatcctacgctaccatccagcacagctatcgtctacgtcctcgtgcggtgctcgtgaaggtctcattcaagctctaactactaactatagatataatatgaaagccattaaactcatactcctaggagtatccctattcagcatcctccccctcggggcacaggtcttcgacaagcctcgctcgctcgctgaggctgatagtctggatcgggtgcagtatcgtgtgctctaccagctagacttcatctctgatcctactgatcgggaatatgtcactcaggatcaagtgcgcttagacatagggacacagatcagtaaggtgtatagtctgaaacactaccaagcagactctgccgccacgcccttgatcgatactggtcagtttcctcggaagatcgtgacagatgttgtcccgccgatgatcctctaccggggctatccgaagacgcaggatattaccactgactaccgcctgcctgctggagcccctgtgatgagctatgtagagcctaagcctaccctacaatggcaggtgaagcccgagaagcgggagatcctcggacatagctgtcagagggcagaggtctcctttggggggaggcagtggatcgcttggtttacatcagagatcccactctctgaggggccgtacaagtttgggggactacccgggctgattctagaggtcgctgacagcgagggggactatcggtatacctgcatagggatcgccaacctctccgctggggagaatatcgtccgctggaagtggaaccagcgccccacgacgaggaaggagctagagaagatcatcgtccagctctatgccaatcccgaacaagctatcaaggccctcggaggacgaatgggcttcaagggtgatcctatgctcaacctcccatacaaccccatagagaagtaaagccatgagcactcggcaggtcttatacatcgcactcctcggtctcggcctctagggctgcaggacgccccgagggatgcttcaggcgaaggaagggcaagccccgatcactcctcgcccgctgtctgagatccaagtgatagatcatatcgcagtcagggatcgagatgggatggctagttgggaagaggatgggcatacctatgaagctgatatggggtgggtaacacgactcagcatcaccgatcaccttccaacactgtcgggagtagagaccctccggtatctggatggggcatgggcgagttacctcaatgagcgactgagccgagtaggtatacggatcgagaaggttatcctcagcgtctcgaatcacctcatcgtctttcgtggctatgaggctccgagccgtagacgtatcgtggactgtctgatagcccctcattctcaaatccgtcgtgtaggagtcggtatgtaagagaggccgatacattgaggttacttcagtatttttggtactctgagtttgatgtattctaaacaccccctattccttgatcagatgcttgagcttagtatcgctcttgattcactccatctcgcatgcgacaaggcttaggatctcttgcttcatgcacttatagcccgcttcgatggtctcgctgagactatcggagaagtcttcttttcaagggtctctgcaatgacgggggggcttgggctcggtagctaagcgaccttggtcatacagaaactttatcatacacggacgcttagcgtttatcgcttctgataatctaaggttagctcaatagcctgttgctctaggatgatcatttgctgagggtattgctctgatttttgaagtatgatctgtgccgtcttgattgattgatagctgttgatagccttcactgtttggttgtagaggatgccgatcttctgaatcagtgctgtgatgttggagagttttcggtagtattcgacggtggatttatcttcggtgatgatcttaaagctcttgtctaggagtcgatcgcgtacaaagtctgatttcgttttggctcctgatttatgaaagagggcgataactgtctcttgctctttggtgctgggcagtcgggtatcccatcggtcccagcgatctatccttttgcacataactcttggtgtagtaattacgacttcggagtgattctctcccctcttggggcaagggtctttgtcggcaaaacaatagtttgtcggacaaagacacaccttgccagtatcaagaatggatgcttcatagcttcgctctatccctctgtctctcgattaattaatttctcgagacctcgagatctcgagatgtaatcctcgcgatagcttaagtgatatcccgtttactatctcgctcgtgataggagctgattcatcactcacactctcgatatgcatagcgcttgggttaaggacatccgcctccgagtcaagtgtattgagctttctctttctcttcaacactcatcatccccacaggacacgtgctccattccccgagtttatgcggtaatgggaggaggagctatctccttttcctttcatcgaaggtgtggtatttacgttctgcttatccatagtgacattttttttatgcgtccaacgatcggagtatgctgattcctttttcgagcaaggcagaggtagcggggcgatggcggacacaaggtttgggggggggaatacaacctggagcccctggggcggaagtgtggagattttccctgccaaccgcaggcaccgaccttggggtagcccaagccccgtcctacctttgcgagggaaaagaaacagcatccgtcgcttacgcatcaagtggagcggctggatgagaagcagaagtgcaaagcctataagtagaaagtaaaaaggtggctagctcctaagagccagccacccgtctagagtatgaggaatcatccttgctaaaggatgcagatcaggatcgccacgaaaatggctagccagaagaggaagccgaggatggtgaaggtaacttgtaggatggttcgtactacgaagcgtagcaggaggaagcccgctatgacacctacaatcgttacgacctgtggagtgacgactcttgagatgaggtagacggcagctacaacaagtgtcagtagaagtgccagctcaatgatacgtcgccagtcaacgaaacgggaaggagatacctgccccttcgtctgcttgtcgggagaggccttacccctgatgaagagggggctgtgtggatcgtaattcattgcttgagtattcatatctgggggcattcttgagtttcaagagcagggacaagatgcttcgcgacacaaagggcaagggtgcttgccccttgacgtgtggagcggagcgtatatcttggctcttgatactcgagtgtccccagtggaatcttactcttgaacgtatatctcagccttgtctacgatgggcaagtgattctcctcaatgagcaggacgatggtacctgtcagctcggtgtagagtagctcatactcacgacttccgtcaaaatcatcgcggagatcatactttgaaaagaccgcttgaatggacttgttgcccaggaggatgggggcgagcttacgggggaggggctcgggaagctcttcggagaactcctgctcaaggatggagacgagggtgtcatacttggagaagtggagtccctgatagaggatctcgctggccattgcctccgcttcgaggtgcgagaagccctgggctacgctatcgcagtaggtggagagggctaggtctgcacgagcactgatgaaggtgctgtcggccattagctcggggtgatgatctctgaggtagccttccagcttgagtcggaagtaggaaagctctttcttagtctgattcataatggggcttttgttaagggggagaggataggcttagaggcccatggcttcgttgaacttatcgagcttgcccgctagctgctccatatcgtgctcgatcttcttgctggtgatacgggcatagatctgcgtggtcttgatgttggtatgccccagcatctttgagacgctctccatcggtacacctttgctgagcgacatcgtcgcaaaggtatggcgggccagatggaaggtgagccgcttctgcaacccgcatacgtcagcgatttccttgaggtaggcattcatcttctggttggagagaatggggaaaagcttaccgtctttggaagtcgtactagggctatacttctcgatgatggccttgggtatgtccaggaggaggatgttactctctactcttgtcttctttctccgcgtcatgatccatgtctttccattcatagtaacgaggtgttctcttctgaggtttgcgacatcaatataggcaagtccagtgaagcaggagaagagaaagaggtcacggacgagctcaaggcgagggatggtcagctccttgttggctatcttcaggatctcctcatcggtgaggaagcctctgtctacaggggtgaggtggaagtggtgatcacgaaaaggatcttggaggagatagccccgctttagggcatagatagtgacggtcttcaaggtcttcatcttcttgacagcggtattgtaggcacatgaggccactgtcgtgaggtatagctcgaagtcttggatgatggcaggcgtgaattccatcagtccgatgtccttacgcttatacctgtgtattaggaactcgaagaagtgtttacgtaagacgctgtacttctgcaagctctccttgctgatggtgtgccccacgcgctgacggatgtcatcgataaacttgtcaaagacagggagaaaggtgctgaactcctggatttgtccgaggtaggcggagcggagcttgtcaagcgagatcgtttggtcgtcttggtacttgtggtagagggagtggaggttggctgagatggcatctagactagcattgacagcgagggcttctgaggagcgccccttctgccggctggtcctgttgttccattgtgccttgtctacgaagatcttcgtggagccaagattgctcattgctcctccgaggaagatgcgtagcatgacgggcgacttgccttctttgttctcatagttagagcgtaggtagaaggacaccttgaccgattgtctcataatgcatcattcgttagtgtagcacgtgctacaaagttacttacttacacattgaatgagagtacgttgctgccttcaattagcccttcatttagccgtcactgctacactaattgctacgtctaattttgtgtagcagtttctgtagcagaatttgaccgattgatgacgattagaccctaggggtaagccgtcaggtctatggcctgtatacaaaaaaatcgttgtaagaccgtgtcctacaacgatttcctcttgttttgaaggcttctctaacgaccattttgcagtcactttgaagcctctttgcggagagagagggattcgaacccccggtaccttgcggtacaacggatttcgagaccgccacattcgaccactctgccatctctcctatgatcgattataagaagaggagactcgctccatcctcctaagatcgctgcaaagatacgcattcttctcggttcgcagaaacgaacttgaggagctatgcggatgtgacccaggagggactcaaaccctcgaccttcagaaccggaatctgacgctctattcaactaagctactgagccatttggatgccagtgccaccatcaagagtgcgtgaaatcccgcttgcatagtggcattgccagcgcaaagatacgaattctttagactcctttgtgagctgcgagagggatgatttcgtagcgtaataaagcaacttcccccgacggatctacggatctaccgggggaagttgctttcgttgagaggcaaaatgctaaaatgggggggcgagaagccttgccatggggcttataggaaggtcttcacttcgctcaggcgctggatgacatagtttaagggaaggctttcgggtactggagctgcgtggctattgtaccagcagcggtcgataccactgcgaagggcacccgtcatatcggcctgaaggctgtctccgatgaagagtacttcattgggggctacaccacttcggcgcatggcttcctcaaagaaggcttcggaaggcttctctgctccgatatcatccgagacaaagaggtcggagaagtagtgtaggatccctgcgacctgcaggcgtgagcgctgcatgtcgagcataccattggaggctacatagagcttatagcgctcactgagatagctgagtgcttcagcggcttctggctccaggatagcttcttcgtggagctgctgatggaagaacttcccgaaggcatcggcatcagcgtcgatggcgagtgcggctaagagacggtggaagatcgtgtcgtggatctcctgtacggtgatctgctggcgctgctgctgcgtccagagtacatcgccgatccaataatagacttcgtagtaactgggctcgtatgtaatgcccatagcttcgaaggtcttccgaaaagctatctcagctgagggacggaaggtcagaagcgtattgtcaatatcgatgaagagcgccttgtacgggcgctccatagcagtcttatgcatgtgagtaaaggtatataatataggctggggacttcgtggggctacttactttcgcttgtcgtcacggcgtgagagtacgaggagcttcacgtagtagatgacgcgtatgacgatagctgccatcccgaggctctggaagagtaggggataggtgctacgacaggcaaagaaagcaacgatagagccgatggccagtacgaagaaccacagctggaggatgaagtcaatgcggtcacccttcttagggcgggaggagcttgtattcatatattatataaacctgatgtaactcgtgcggttcactcccatacattatatataggaggagaataagagtgcaggccctcccgcctccttcatcggggcgggagggcctgcagtctctaagagaggatggagggcttcttagaagcgcagaccgacaccgaaatagaaggaagcgttcttgaggctcgcttcactggccttctgcttgtagatgttcgtcagaccgatgtccgaacccagtcggaagtacaggctgctgaggtgaacagcgaccgaagcattgacgcccgtttcgaagcgcttgaggccaccattctggaagtcgaggaggacatccttagcggtagagctggaggagacaccgtaggagaacgatggtcccccttcgagcgatacagctaagccaccgaggcccagacgcagaccgaggttgacgggtacgctcagatagttcagcgtcgtcgtctggtcgcccagcttactcccgttctgctggaaggcgataccaggagcgatatagagcggaccaaggagaccgacttcgacagccccagcgacgcggaagcctggacgagtcttgtagtccttgacagagtagccactagcgtcctttacgatattcgtggagaagttccccgcgacttcgagacggggatggactccctgagcttgcactgcgaaggtgctggcgagcagcgcaacggctgcgatgatcatcttcttcataattcgttcgtatgtattaaatatacagcggtagaaagcctatctaccatgatgtatctataacggagggagggactatagatgatatacacgcttaccagcggttcttcttcttgcctccctttgagctcttacctcccttgtatttgtcgaaggcaccctcgctgctcttactccccttgcggtaggacttgcgctcgggagcaaagtcttgattgcgacgactgcggcgttccttcttgccatcaccactccccatagcatcagcatagtcgactgcgatacggcggccatcgacctcgtagctactcattgagcggatgacctcctgagcatcagcttcctcgacttcgaagaaggcaaagcgtgggagtaggtcgatcttaccgatcttcacgcgcccagggacgcacttattgaccagctcaatgagcttgttggggaacatacggtcgagcttaccgaagttgatgaagaggcgcttcatcccctcctcagctacggcattgcgcttgtcacgcttcttgccttccttgccttcgcccgagaggcggcccttgtcatcggcctcctcgatcgcctcttcgctctcgtagtagtcgagcaggcgacggtgctcgaggagcatcagtcggcgtacaagctcctctctgtcgatccagtcgagcttacggaccagctcggggagcacggtgtcgagcgtcgtatcctcggtgagctcgacacgctcgatgcggtctgccaggtggaaaagctgcttttcgcagatagcctgacccgtggggaggtgcttacgctcgatggtggcatgtgagatgcgctcgatgtcacgcagacggccacgctcacggctgtggcagatagcgatggagatacccatcttccctgcacgtgctgtacgaccactgcggtgggtgtagctctcgatgtcatcgggcaggccgtagtggatgacgtgcgtgaggtcattcacgtccagcccgcgagccgccacgtcagtcgcgacgaggagctggagattgcggatacggaacttctgcatcacgtagtcacgctgagcctgcgagagctcgccgtgcagggcatcagcattgtagccatcacggataagctgatcggcgatctcctgagtctcacgacgcgtgcggcagaagatgataccgtagatatcggggtagtagtcggcgatacgcttcagagcaaggtacttgtggcgtgccgatacgacgtagtagtagtgacggatattcttattcccctcgttctttgtcccgacgatgatctctttgggctggtgcatgtaggaggcagcgatggagctgatctcacggggcatcgtagcggagaagagtaggaggtgacgctccttaggtacttcggcgaggatcgtctggaggctctcggagaagcccatcgtcagcatctcgtcagcttcgtccaggacgaccgtctcgatgctgtcgaggctggctgcaccacgctccatgaggtcgatgagacgacctggggtggcaacgatgacctctacaccgcggcgaagtgtgcgtatctgtgcttcaatggatgagcctccatagacggggaggatacgtactgaggggaggtacttgctgtaggccgtgaggtcatcagcgatctgcagacagagctcgcgggtagggcagaggacgagggcgcgtggtgtagcgacgccatcgttgggctgagcctgaaggcttcgctctacgttctgcaggaggggtaggccaaaggcagccgtcttccccgtccccgtctgggccagggcgatgaggtcaatgggggcacctaagaggtaagggatcactgcctcttgcacaggcataggctgttcatagccaagctcacgaacggcttggcagataggggcacttacccctaattcttcgaatgtcatctaatgtaactgataagtaagcatccgtccgccccgtgaggggtagagggacaatggacgtatgctctacggtgaagtccatcagcctgacctcgatgagtgcatacataaatcataaaatagagtgtgggtaacccatcggaatgcgtccagctctcccgagctgtgcgtgggcgccctgcggtggagactacttcttcttctctatctcgggagagacgagctcgcggctcttgtccccgaggtagccaccatggtggcgcagtgagtagtcgtggtaggtgaagccgatgcgttgcatcacgctcactaccaggaggtcaccgagcaccgtcatcacggttgtactcgtcgtaggcgtcagccccagagggcatacctctgcgggattgcccgtggagagggtgacgtcgacgagctgagagagcggactctcgctattacccgtgatgaggatgaagggtaggcggggatacatgcgccgtgtgagggcgacaagctccagtacctcgcgtgtcttgcctgaattgctgatcaagagcatcacatcactctcacagaccatccccaagtcgccatgctgtgcttcgctcggatggaggaagtaagcgggcgtccccgtagagctgaaggtcgtcgcgatgttgtgagcgatctgtccagccttccccatacccgaggtgatgaggcgaccaccaccctgatgcacgtgctccaggatcaggcggatagctgcttcgtagtcattgtcttgtgggatggtacgcagtgcttcgatctcagcgctgaggatctccgggatagtatattgcttagacatgtcgctcgtggcaaaactttttctcttccacaaagatacgtctttcccccgagagaggagctgtcctcctacggcttttagatagtgggtattccacttgatctgtgttacgccgatgtgattcgctatacgaagaggttatcttacagcgttttataagtgaatgttgcactgcagtactacttagtggtggtttgtttctgcgaaggaaaagctggagacagccgtggaaagccctcctatgagtacgagtaaaagtagcggacgagtggctgataagcttggtctacgtacgtggtccttagatccacgtacgtggattttagggtttttgtacctggtctttacgactacgtgcatagatagagaaatcccactacgggaagctgctttttccttcgcaagaatgccgcttattttaagggtatttaacgtgtggtgtctataacttaatagttactgtctattggaatgcgtttttggatcatagtatctttgtgcacgaattggatttttgtgcttctgagcctttaggctcggaaagctactgttactctacgcccgtatgggatttactaaatgtcgctgggcacgtagtgagcatcaagcttcactcccacagctcagcactatgctatgtctgaattaaaatcaaatttatccttgattgtatgttgaaaaaacttctcttatttgctggtctcttcggcaccctcctcgcttcttgtcgtcaggaagatggtgatcgactggctcataattctgctacatccgaaggcccgggtgtagaagtcatgcttgactttggagccgaacagttccgtgatacctcctcagagcaggggcagaagacccagtcaggtcgtgcctttgactacgtcgtctacgatgagacgaacgggggtactacgacgacttcctctcaccttgacctctcctcagtcaagggggatattaaggctaccgtcattcttcgctcgacggattcttctcagcctgtcacggtcggtgagatcacgatggagcgtcgcacctcttatcctgatggctctgctgtccccgccgaccgtgtgtacctccacacaaagcctggtggctcacctgtgactgcgacgggaggaacggacttcactaaggggagttggagtgtagcactggtcataggaggtaagcgcaataatcgcaccctggccttcgaccccaataacctggagtcggtgaagtactccaatgatgtacagtctgaccagggtattgatcgctttagtgctcagaataagtggaacctcaaggggatcacgaagtctactaagggagatagctatacagacgaagagaaggtgacgctcgacgtccccttcttctcacagtggatcactctgtcagacgcagacttcgttaataaggccggtggcaacaatgctatcatctttggtagccgcttcaccctgcgccctcaggggacgctcctgcgacttgagatccagaatcgtgactttgctcctatcaagctggccgggatacgtattctaacgaatatgcttgccttccgaggtagttatgacctctcggatgataacatccgttcgtcaaaggacctcgcttcctcgtggactggtctccgtcctgatgggaaggctattattgattcagcagccgctaactatggctggccgctggctttccccaactacgcagacttctggttcaaggacaaggaggagatcgctacgggggctaagtctgctaaatactacctcatctgggctatgccacagacagtagagactactggtgccactaccaatgtagggcgtactaaggagcagagccgtggtggtatcatgcacgtcctcctctatgatgctaaccgtacgggagctgaatataatcaagaaacgagtcttgatcagacaaggggagaatcatgcctacccaaggctcttattcgtaagccactcttaacccgcaatttccctgcgggagccttccgactttcttcttctgagctcagtggtcagactctacgcctggtgggagctcagactaagattcacaccttccttagctttatggagaaggaggatacgggtgattatcatacatatgatgaggttgctacgacaagcctcggtgcggatcaggtattgccagtccttcataagtgggcttctatcttcccagggaagctccccgataatccctataaggactcaagctctggtaactttacttatagacactacctctactcgcgggataacaataataccgtcccaaagagtttcaactctaataagtatggtcctattaagctccctccaagagaatacgaaacccaagagagatttccattggtcttgacaggggatatagagaaatatactccagaggcagctacggggctctctacggccatatcaggtaaggctcgaaatatcgccccaattagtatccctaaggatatgcagatcccttatattgttggtgatgtagagaaggctcctctatacaagaccgatgctccgaatgaaggcttgtacttctcgacttattactttaccaataatctagttcgaaataatgctggcccccgagatgcctatatgctcgttgggtggggggaaggacagcagttcctgacggcaaatgcctataagtttgatatggataatcagaagctgcatatctattcccgctacttaggtcctgcttatcaccgaccttattatggtggttggagtaccctctactcttgggacgtttcatggtatatctggaagaccgatcgtcctactcgaaagttgctatatatacctgaggtagatgatacgcagcgtgagctgacccttggtggatataagtacgatggtgtccgagaaacgaatgtaaattcggaccatggctcaagcaactctctattctattggattcatagtgcgggctctacaccaagttggctctacttctatggtgagagtatctctggtaatcgtggtccgcagggcgtgggagctgtcgctaatgcgaagggtgaggcttactccactgcagaccaaagcaagctgaaggcttatatccgcctcttctctaagaagcctatcgctaattaatctcacataggataaatatcatctgctggctccctctcctctcatcggagggggagtcagcttgctttaggtcggtaacgagcttgcgacgcatagagcaggtagttttccgtatctttgcccgaaactatgggacgaatactcgctatcgactacggacagaagcgctgcggtgtcgcagtcacggatcccctccagattaccccgggggggctcgggacgcacccgacacatcagctccttgccttcgtcacagactacgtacagcgtgagtctgtggagcgtatcatcatcggctatccccgtcagatgaataatgaggagtctgcctcgatgaggtatatccgtccctttgtagagaagctccgtaaggccttgccctctgtccctattgagtatcaagatgagcgcttcacctcgactctggcgcagcgtgctatacgtgaggctgggattggcaagaagcgccgtgagcaggataaagggctcgtcgacgaggtcagcgctgtcattatcctgcagagctaccttgagagccgtgatggtcttggggcaattcatctaccattcaaataatatcacctaatcatccctacgatgaagctacctatatatatatatggacaccccgtcctgcgtgaggtcgggcaagatattactgccgactacgaaggcctgagtaccctcattgaagatatgtgggagaccatgtatttctctgatggtatcggcttggctgcccctcagatcgggcgtgccatccgcctctttgtcatcgatgccgatcctatggcagagacgttccccgagtgcaaggggctcaagcagaccttcatcaatgctcgcatcgtcgagagtagtgaagagaccctcgcagagaatgagggttgcctcagtatccctggtgtcaatgagaaggtcacgcgcccagcgacgatcaccattgagtatctggatgcagacttccagccccatcgtgagacttacacgggctttgccgctcgtgtgatccagcacgagtatgaccatatcgagggcgtcctcttcatcgataagatcgcgacgatccgtaagcaactcatcaagggtaagcttgctaatatgcagaagggcaaggtgtcggcacactatcgtgtcgtcaccgctccacagaagcgtaagtaatcctcaggctactgggctcctcgtgcctcagccctcactcctacactacgagatagacgacgtatgaagaagtacacacttgcggcccttgccctcctcctatctgcctctacgctacgtgcgcagatcgatgtcgagcaggcgctttcgatcggacgcaatgcgatctacttcaatgactatatcgtctcgatggggtacttcaatcagatcatcggcttgcgcccttggatggccgagccttacttctatagggctgtggcgaagatcaaccttgatgactacgccggtgctgaggctgatgcctcactggctcttgagcgtaacccgatctttcctcgtgcctacctcctgcgtggcatcgctcgcttctcgcagaaggagtatacgcccgcagtcgaggacttccgtcgcggtcttgagctttccccacgagatgtgggccttcagtacaatctatccatagccctactgcaggataagcagtatgcggcggcagatagtgcagcccagcgcctgctggagatcgatccgaagaacaaggatgcctatcgcatcttggcacagtcagctcttgagcgaaaagatacagttagtgctacacggcaggtggactatctgctggcgaaggactcaacctacctgccagctcacctcctccgtgcccagatagcagccgagcgcaaggactataagacgagtattcgtgcactggatcgggtgttggctcaagatgcaggtgatgcgaatctctatgtcaatagagcgatcatgcgctatcacctcaatgacctgcgaggggcgatgagcgactactccgagggactacgcctcgagccgaatgaccgtgcagccctcaacaatcgtgcgctactacgcacgcaggtaggggagtatagcttggctattcaggactgggataagctcctgcagcttgagccagaccactacatcgcgcgctacaaccgtgcactcctacatcttcgcttggggaaccttcgctcttccttagaggatctcaatatcgtactcaagcgctatcccatctttgccgaaggctttatggctcgtgctgaggtgcgccgtaagatgggtgatgtcaagggagctacacgcgatgagcttcatctctttgacctgcagaatagcaagagctatcgcaatcgtgccgcctctgcttctcgccccactaaggacggtaaggagacgcgtagccgcgaagatgaagcgatcgagaagtacaatatgcttgttgagacggctccagagccggttaaggacaagcccagatataccagccagatccgtggtcgtatccaggatcaggagacgcagatgacgcctcgtcgtgacctgacgctctcttactttgctgagatagataaggatgggaaccagggccaggtctacttcgcttcactattagatcgtctcaatacgcagcgcctgcatcaggataagcgtgcccctcgccttgtgctccgtgagcaggggagtagcctaagtatggcagaggtcgaagaggtacagaagcatctcagccagctgaatgctcagactgagaagactgcgcagctctccttccttaagggcattgatcacctcctcctgcaagatcttagtgcagcaatatcaacccttaccgaggctatagagcgtgacccatcatttactttagcctactttgctcgctccatcgcgtcacttcgtcggagtgaggctgagcgtgggcgccctgttgagcagtctactccttctacacctcaagtccgagcagctgctacggggggtaagggcactacacctacagagctccccctacctacgtctaccccaacgagagtcgtcgaatactcccccttggctgatctcaatcaggtcattgctcaagctccgacattcgcctttgcctattataatcgggcgaacctgtatgctaagacgggggatgtagagcgagcaaagcaagattataccagggcgattgagctcaacccgctctttgccgaaagctatttcaatcgaggtcttctctactattccgaagggaaggtgaaggagggtactcgcgacctcagtcgtgccggtgaattggggctctacaaggcctacagcctcatcaaacgcatgaataaataggcgtaccgtaggggagtacatggaaagagctaactttgtgcatcaacgtatcaaaagcataagccaatgaagatcgtctactgtatctctgcgatgtttaagtccggagggatcgagcgagtcatcgccaataaggtgaactaccttgtgaaccatggctatgaagcttgtatcatcactacggatcaggctggtcgtcctgacttcttccctatcgataagcgtgtagagcgagttgatctggggctgaattacgatcagtttgatgaactctccccgtggaagcgatattggaagacgtatcagttacgctcccagcacaagatccgcttggaggctgagctcaagcgtctgcatgctgatatcaccgtatctgtctggcgtcaggaagccagctttctacccgacttaaaggatggaagtcgaaagatcctcgagttacattctgccaaggcaacagcagagcttatgcatcctgcggagagcaagttgagacgcttcattgggcgtcttcgggtagcccagcaggagcgggtcgctgctcgctatgatcgcttcgttatccttactcatgaagaaaagcctctttggaagggcttttctaacctgagtgttatccccaatgctctgcctttctctccccaaaagagagccgatgtatccaccaagcatctcatcgctgtgggacgtatggagtatcaaaagaactttcccgagctccttcagatctggtctcgtgtcgcacctgactttcccgaatggcagctacacctttatggtagcggctggatgcttgatggcttgaagcaccaggcaaaagagttggggattgcctctcaagtctcctttgagggagctgtgagtgatatggagacggcttatgcctcctcctcggtctatctaatgacctcacattatgaaggactccctatggtgcttctcgaagctcagtcggtaggcttgcccgctgtctcctatatgtgtcctagtggacctcgagatataatcacggatggtaaggatggtttcttggttcccctctatgatcaggagacttttgcagagcgtcttcgaacgctaatgcatgatgaagaacttcgtcgtcgtatgggacaagccgcagagaaggcttcgcatcgctatgaccttgatgtcattatgcctcagtggctctcgctatttaatgaactcgtaaagtaacccctcttatgaaaattgcctacgttttaaataatacttggtacgctggaggccagactcgcgtgctgatcaataaggtgaactactgggttaagcagggtcacgaagtatatatcttaacgtcagatcagattgggaattctccctactatgaaatggatccgagggtaaagacggtggactatgccattgggtacattggagcagaccagcttagcatgctacagaaggcgatgaagttgcctggcttcctcattcgtcattatctccggatgaagcgaactctgatggagattcgtcctgatatagtggtctctatgtatggtaaggagatcttcttcttacccttcatcaaggatggaagtgctaaggtcttggaggcacatggtgcccgctatacttggaccttctccagaaaggggctcttaggtaaactccaaaactgggttgatattcagctggttcgtcgctttgatcagtttgtcgtcttgacccaggaggatatacctaactgggatgtccccaatacgatctgcatacctaatgggaatacattcgctccagttgagagtgccactcttgaagtaaagaaggtgatttcctctggacgccatggtgtacagaagaattttgaaaacttagttgaggcttgggcaatcgtacatgcagcttgtcccgactggcgcttgaagatctgtggccagggactggagaagcttgatcctatcattgataagctccagctgagagatagtatcgaccgcttagagtcttctgatatgcagaaggagtatatggactcatctatctcggttgtgagttctcgccatgagggcttttcaatggctcttgcagaagcgaatgcttgtggtgtgccgaacgtctcttacgcttgtccttgtgggccccgtgatatcattatcaatggcgaaactggtatccttgtagaggagcttgaggattatcataagctggcggaggggatcatccgtctgattcaagatgatgagttgcgcaagaagatggggaaaagagcgaaagaactctccgtacgcttctcggaagagtccgtcatgcagcgctggacgaagctattcaccgagctcatcgctaagaagaaaaaaaattagcctccacgatgcctaagctcatactcgtaccgactccgatcggaaaccttgaggatatcaccctgcgggctctcaatgtcctaaagagagtctcgctgatcttggccgaagacactcgtatctcagggctactcctacagcactatgagatcaagtgcccgatgcagagttaccacaagtataatgagcatcaggctctcgagcgcctgtgtgaacgtattgagcaagagggtgaggtggctttgatcacagatgctggtacaccagctatctcggatcctgggtatctcttggtgcacgcatgtattgagcgaggaatcgaggtggaatgccttcctggcgcaaccgccttcgtcccagccttggttatctcggggctaccttctgatcgcttcgtttttgaggggttcctccctgtgaagaagggtaggcagacgaaactgcagggcatagcatcttcagactatacaactatactgtacgaatctccacatagaatcgttaagacattagagcaactctccgaacacatgggagcagagacaaaggtcgctgcagtccgagagatctctaagctctatgaggaagtggttcgtggaagcctcgcagaggttatccaacatttcaaggagcaagagccccgaggagagttcgttctcatagtgggtaaaagcactgtaagtgataagaaacaagatacaatagatcccatccacagctcgtccgacgaagaggatcgacgcaagatgaagcgatcgaagaagtggaataagtaaatcgaataaacgtatgacaaagagacttgtcttgggtgcagcgatgctgcttactctcgcttcctgcgggaagaactctggcgaatatcagacgctcaagcagcagtatgattcactcgccctgatcaatcagaactatgaggctgagctccatgaaacagactccctcgtggccagtgtcctgacgaacttccaggagatctcctccgtcgaagggatgatcaatgtcaatcctcgtagtggcgacctccagcgctctgagcgtgatcgtatcaaggacaacatgctcctgattaacgataagctccgtgccagcagtgaagctcttgaccagctgactaagaagctggagtcaagtggtaaggaaaacaagcgtctgcacggcacgatcgctgctctgcgtaaggagctcgaaaaccagaagcagcgtgtcctcgctctctccgaagagctcgagcgtaagaacctcgctatcggtgtgctggactctatgcttactcagcgtaatggggacgttgatcgtctgaatgtcgctgcggcacagcaggctgaagctttggctgctcaggataaggaaatgaacaccgtccgctactgcgtcggtaccagctctgacctcaaggagatgaacctcatcaagagcggtcgtgtcgtcacggagaacgctaacatgagctacttcacgaagacggacctccgcgaactctcgcagatccccctcttcagccgcaaggctcgcctcttgacggtacatccagcttcttcttatgagctcgtacctggctcagataagcagcttgtcctctacatcaagaatgctcaggccttctggagtaactcaaagatcctcgttgtccaggttgactaagacagtccctgaggcatgagaatctaatctcactaacgaagacgagtctatagcccgtgcccacatcgtggggcgtcgctatagactcgtcttcttctttattcgtacttcctaagtagactgctgatgggttatacgactactccagctcttgtactccatcgtactcgctatagtgaccgctatagcatcgtacacctctatagtcgggagataggctacgtcggtacgcttgtccctgagacctccagccgaaagaacgctgtgcgggagcacctgcgccctttgtcagaggtggagatcacgctgtcgcttagtcctcagcgtgatttggcacgtattcaggaggtacatagcttgcaccctcgccacgcggtccatacagacccggctaagggggcccaggcgatcttcctgagtgagttcctttaccgcatcctgtcgacgacgcagactcccgatggcgagctctacgactatatctcctcatcgcttgtcctgtgggaagggcttagtcgcggtgttgcgaactttcacctctgcttcctactgacactcctcccttacttcggtatcgctccagatcttcctaatgaggaggctcgaggatgtggatattgcttcagcctgcaagagcagtgctacctgccacagcgagaggcttattgcctgtcaccggaggagaccctgcatctgccacttttccttcggatgagctatgacacaatgcacggctttgcctatagccgacagcagcgtggggtgattcttgactacctccttgcctattaccgcctacacttacactccttccctcagctcaagtgtctcccgattcttcgccaacttgggcagtctgcagagagaaactaggtaaattgccatgatctgagcacgatatggcgactaatcatgggatatttactacatttgtatcataaggtgtgcaattagtggcgcaccgatccatccttgtatgaagaaactgaatgagctggatctgaagatccttagacgactgactacgaatgctcgcgtccccttgcgtgacgtagctgagggagagaatagctcgcgctcctccgtcaatcagcgtcttacacgtatgattgagaatggggtattgacctcgctaaagtatcatgtgaatcccaagaagataggctacaacacgtgcacctacgttggggtgcgcctggagcgtggttctctctacaaggaggtcgctgagcgaatgcgcgagatccccgagatcgtcgagtgccacttcactacggggccctatacgatgcttatcaagctctatgcgattgataataacgacctcatgcgcatcctcaacgggattattcagagcatcccaggggtcgtcgctaccgagaccttgatctcgctggatgtaagcttcgagcgtagcatccatatcccagatcatatcccccaataggcggtctccgtgcagcagcaagctacgactgtccgttcatttagtctgaccgagctcttgggttcggtcagacgctgtttagagcactccttccccgatcgctattgggtgcgggcggaggtgagcgacctgcgtcgtgccggtggccaaggtcatggctacttggagctcttggagaagggtgaggaaggggatgtcgtggcgaaggtgcgtgctacgatctggtcatcgacctatacgatgattgagcaacgcttcgagagaagtggtgtgggcaagctcacttcggggatgagtatcttggctcttgccgggattgccttccatccgcagtatgggctgagcttgaatattatcgatattgatcccaattactcgctcggtgagatcgctcgcctgcgcttggagaccatacagcgtctcaagcgcaatgggctcttcacgatgaataaggagcttgagctccccttccccctgcagcgtatcgctatcatctcgtctcccacggcagcaggctatggggactttatgcgtcagctccatgagaatccctatggagtagtgctctatacggcgctcttcacagcgcagatgcaggggaatgatacgactgcatccatactcgctgcactggggcgtatcgccgaggtggaggagcactttgatgccgtggtaatcattcgtggtgggggtgccgtgagtgagctaagagctttcgatgactacaccttgtgcgaagctgccgcgcagttccccttacctatcattgcgggtataggccacgagcgtgatgtctcggtgcttgatctgatagcccatactacgctgaagaccccgacggcagtagctaccttcttagtcgaggggctggcaagagagctggcagagctgcgggagcagctacgccgactcccctctttgctacaagccctatctatggggcgaagtaattggctccatacgcaggtctcgcgtctaccgctcttagttcgtggtcgcttggagcaggctgagcgcaagctacttatgcagcgctcgcagatcaccctctcagctcgtcattatctccagcagtctgagcatcgtcttgagctggtactccgtcgtctccctacagctgcatcctatgctttgcgccagtatcgtcaggtgcttcgtgagcgactctctcccctgccactgtatgtatcgcacttgagagagcgtatggaggccgatctcctgcgtcaggagcaagcgatccgcttggcgcatcccgatcagatcctacgtcgaggctttagcttggtctctgtcggcggacgtatcgtcacacgcagtagccagatccctgcgggagcagagatctcggtgcgctttgctgatggcgaagtggaggctgtgacgaagaaggaaaagccttaggccttagttcctcagctcggggaactgaaagataggtagtccagcacgcacccataggcgggcgatcccatcatagagtggcgagatgacccaccgccacaccagcaggcgaagcttatcaatgaggatactccccgcaaagaccagcaacataaatcccatcactgatacgatgaaaagtcccgtcgggtgctgctcactcagctcccgcacaaatcccgtatatcgcccgatgagccgtgcattgcagtgaatgaggtagacggcgagagtcgatgagcctatccagtttattgcggcactctgtaccttgaaccgagagaaggcgaggaagagcagtacggctgagaggatattgatcggggagacatagctcatgaacttgtaggcaagcggactcgctacgattgactgccccgtcccgtaggcaaagaggaagagtgcgagagattgggcaaaggtgagcccaaagtagccgaggaggaaggttcgtccgctccagcgctcaaggcgctgagggtagaggcgtagatagcgcccgatgaggtagatgcccgagaaggcgaagagtgaatagccatccttgacttccagctgatcatttatgaagcctaagacgaactccactaagaagaagaggagaaggtagcgccttagctcctgctcactcgttcgctgagcgagagcattgaggagtggggagaagatcatgaggctcagataggtcgggaggaaccactcagactttcgatttaggggcatgaggctccccacgaattccgataggttgaatggctcaagtccgaggagtacgagggtgctgtacactccgacggtatagaagaaggcttggaagagtaggctcacgatccccttgacgcgtgccttgatcccgaagtatcccgagatgagtatgaagacattgactccgacgatggcaagtgcttcgctccatacttggcccagagatgtgagtggctgcgaatggatcgcttcattggttgggaagcggaaagcgaggaagttggcatgcagcacaaggatgagcagcatagctaagatgcggagtagctcgaagttggaggctcgagccgtgccagaggttggggtactcacggggataagagctatagggatgaaagaaagctatccctccgtcgttgcgaagggatagcttgagggtgtgagtaggggagtggtgctccccacgtagcattagtaggtgagctcaacgagcaattcttcaccagattcatcaaagaggagcttcccttccttcgcgagccaaccgatggctgcaaagagctccttgtcagagcggagcttggttgctttacgaagagccttaatgtccatcttgcccaggctgttaagggcattccatacgaggccagcattggtgccgatacgttcgatcatgtgcgttcgaatagattaattgttagacccatagtgccaccagctctgcaatagcactggctttgcggtaaaattaccaactcttttctgataaagcaaacggcctacacgagagtagaccgctgaagtggatagcccgagtatataggctccttgtaccgtaatgtatggggggctcataataggtatatgagtacgtgggtagagctatataggatggcgaagaaagctatatagctttgggctgattcctatatagctttcggtgcgaagctatatagctttgtgaagtaacctccattagattgttgctccgtgtagggataaaagttgcggacgagtggtagataagtttggactacgtacgtggctctaatatctacgtacgtggatatttggactgacgtgcctggtctttaagactacgtgcatagatagagaaaaaccactacgtgaaggcgcttttttcttcacgagaacgatgcttttcccttcgctggatgagaggaatatgagcgataaggtgaagggcttgcgtgtctcttcggagaggtgtatcggggagctgggcgtgcgatgccttagcactctaaatagaggacaggactcgcggcaacagtcccatataggtcagtgggctgacctatatggggctattgcttctgcctgtcggagactacaggaagacctcgctgcgacgctgcttgggggtgatcgtaggctgattgatatcgtcgtcgctacgcttcccgattgagatagcgaggacggggcgatacttgtcgtgatggagtatctggtcgtaggcctcgaggtcgatgccctccatgggtgtgctgtccagctccatgctcgcaagccccgtcaaggcgatcccgagagcgatataggcttgactacgcatccagcccaggacggtggcctcgccctgagaagcgatcttattgcgatagaactcctgcgctccttcgctgagcgtggcgatacgctctgcttcgaaggtcgctacgtcacgatagttatctacgtcacgatagttatagatgacgaggaggtgactggcttgctcgatacgctctttgttggagtacgagtgctgggcaagcaggctctttgtcttgcgatcgccgatgagctcgaaggcccagggctggctattgatagagctggggcagaggcggagcatctccttgatgtcctccagctgcttgtcgctgaggtgaaaggtgctgtcgtaggtcttggtcgtgtagcgtgagcgaaggatatcaagtatttccattctatatatttccattctatatatgatttctattgagtggtggactgtagagatagctctcgagcccgtgatcttgcttttatctatcaacctcaggctgtgaaagaatgttgagtaggcttagcttaccatccggctatcttcattgatggtaggaggtggtggtcggactagctacgataggggagagagccttgggcgtaatgccctactcctatcgtagaaatgccttatctttgcgtagattagtaaagaagtaaatatcagaatcagcatatagcagaatgaatatcttagagctgagcgaacaggagatcttccgtcgccgtagtcttgaggagcttcgtgccctcggtatcaatccttatccagcagacgaatatgtcgtcacggggtatgcccgtgagatcctcgataccttccaggatgatgcacctcgtcgtgaggtgcgtgtcgctggccgtgtcatgggccgtcgtatcatgggtaaggcttccttcctcgagctccaggactctactggccgtatccagatctacatcacgcgtgatgagatctgcccaggcgaagacaagactctatataataatgtagtgaagaagcttatggatatcggcgacttcatcggtgtcgagggtgaagtctttcgcacacagatgggggagatctcggtacatgcctcctcgctgaccttcctctcgaaggcactgcgtcccctgcccgtggtcaaggagaaggatggtcagaccttcgacagcttcactgatcctgagctccgcttccgccagcgctatgtcgacctcgtcgtcaatagccatgttaaggatatcttcctcaagcgtacgaagatcttcaatgcgatgcgccagttcttcaacgaacgtggctacatcgaggttgatacgcccgtcttgcagcccatccctggtggtgctgctgcgcgccccttcatcacgcatcacaacgcgttggatatcccgctctatctgcgtatcgccaacgagctttatctgaagcgcctcatcgtcgggggcttcgagggtgtgtatgagttcagccgtaacttccgcaacgaaggtatggaccgcacgcataaccccgagttcaccgctatggagatctacgtctcctacaaggactacaactggatgatggagttcaccgagcgtatgctggagtttatctgcctcgaggtcttaggtacgacgaaggtcaaagtaggggatcgcgagattgacttcaaggctcccttcaagcgtatcactatgcttgatgcgatccaggagcatacgggtatcgatatcagtcagatgggcgaggacgagcttcgtgcgacctgcaagaagctcggtgtcgaggtcgacgaatctatgggtgtcggtaagatgatcgatgagatcttcggcgagaagtgcgaaggcagctatatccagcctaccttcatcaccgactatcctaaggagatgtcacccctgacgaaggagcaccgctctaatccccgcctcaccgagcgcttcgagctgatggtcaatggtaaggagctggccaatgcttactccgagctcaatgaccccatcgatcagcgtgagcgcttcgaggagcagctccgtctctcagagaagggggacgatgaagcgatgttcatcgatgccgacttcctccgtgcccttgagtatggtatgcccccgacgagcggtatgggtatcggtatggatcgccttgtgatgctcctgacaggtcaggaaagcatccaggaagtactcttcttcccccagatgcgccccgagaaggtcgctcctcgcgacaagaaggaggtcttcatcgctgctggtatccccgaagcatgggtacccgtcctgcacaaggctggctatctgactctggagtcggtacgcgccgaagagaagcccggtcgcctgctgcagcagctccaggatatcaagaagaagtatcagctggatctggagcctctgacgctcgagatcgtcacagcttggaccaccatcgggggcgctcagtaagcgcaccccgcactctctcacgagccgctccccttcataggggagtcggctaagtaagtacacgtatcatgcccgaacagacttccagcttccccggtagagtaggtatcctcggtggcggtagctgggctacagccttggcgaagatcgtcctctcacggcaacccaaacttaactggctgctgcgcacctcgacacacgtcaaggacttcaagcgcctgcgccacaatcctggttacctgacgtcggttaccttcgatacggatcgtatcaccttcttcaccgactcggatgtcaatgacttcttccgagcctgtgataccgtgatcctggctaccccctccccctacatacgctattacctcaagcgtgtgcgtaactcggtcatccgcaataagctcgtcatcaatgcgatcaaggggatggtgcccgaggagaacgtcctcatctcggactatctacaggagtataaggagctgcgtcccggtcagatcggggtcatcgcgggcccttgtcatgccgaggagatcgccaaggaccgcatgtcctacctgacggtcggctgcttcgatatggctaaggccaaggtgctgagcgaagagatcttcagcaacgactacgtccactgcgctgtcagccgtgacgtcgtcggtatcgagtacgcagcggtgctgaagaatatctatgctatcgccgctggtatctgccacgggatgaataagggagataacttccagtccgtgctgatatcgaatgctatcgcggagatgagcaacttcgtcagtacggtgcatctcgtcagtcgtgacgtgacagagtccgtctacctcggtgacctcctcgtcacggcttactccagctatagccgcaatcgtaccttcggtaatatgatcggtaagggctacagcgtccgtgccgctcagatggagatgaatatgatcgccgaagggtactacggcgctaagtgtatccatgagatcaaccagcgctaccaagtgacgatgcctatctgtagtgccgtctacaatatcctctatgagggtgctcccgtcgagcaaagcatcgagcgtctatcgactctcttcaagtagtccccttaccttccccaatggctacacgcccccatcgtatcctattgagcttcgatatagaggagttcgatgtgccacgtgagcacggagtcgaacttcctatggcggagcaggtgcgtatctctgtcgcaggatcacatgccctcctcgatgtactgaagaagcatgaggtacgtgcgacccttttctgtacggcgaacttcgctcagcatgctcccgagatcatccagcgtatcctctctgaggggcatgagcttgcatcacatggttactaccactggacctttgagcctgccgacctgaagaagtctaaggacactctcgaggctcttgctggagtccctgtgcgaggctatcgtcaggcgcgtatgatgcccgtccctgaggcggagatctataaggcaggctatagctacaatacctctctcaaccccaccttcatccctgggcgctacatgcatctgagtgcaccacgcacgcactttatgaaggagggagtactgcagatcccagcttcggtgacgcctcttattcgcttcccgctcttctggctctcgtgtcacaatcttcccttcggactctatcgttggctctgtcgtcgtacgctccgtcatgatggctatctggtgacctacttccatccgtgggagttctacgagctgaatgagcaccccgagctgaacctccccttcatcgtgcgcaataactctggccgtgcgatggtcgatcgactggatcgctggatcagttacttcaagggagagggagctgagttcatcacctattccgagttcacggattctataataactatctaatttcttttctcaatgaacattaacaagtccgctcttacgctgacgctcatcggagctgtcgcattgcttgtctccgtcttcgtactcgctggcggtctgaagggcttccgtagcaattcgcccaagacgatctccgtcacggggaaggctgagcgtaacttcacctctgaccttattgtctggtctgcgaccttcacctctgagtcgacagatctgcaggatgcttactccgagcttaaggggaagcagcaggccgtagcctcttacctcaagagcaagagtatccccagcgaagctattgcttacagcagcgtcagtatctctcgtgagaatgaaagctcctatgacgagagctctgggcgtaccttctatcgcttcaagggctactcactgacgcagacggtgacgatcacctcgcgcaacatcgaggctatcgaagctgtctctcgccagatctctgagttgatcaataatggtattgagatcgagtcgggcaatcctcgctattactacacgaagctcaatgacctcaagatcgagatgctcaaggaagcctctgaagatgctcgcaatcgtgcctccgtcatcgctgagggcagtaagagcagtctcggtggcctgacgaagtccaacatgggtgtcttccagatcgtcggtcagaatagcgacgaagattacagctggggtggctccttcaatacttcttctaaggagaagaccgccagcatcacggtcaactctacctacaacattaagtaaagtttgtctgcccccaaagcattcatccctctgatcatcacatgatctctatccccattccccgcttagtgatcgtctccccgtgctacaacgaggaggcgatccttgcttattccgctcgcgaactcacgaagctccttgagcgcctcatcgcagcaggtaagatccttcccacaagtcacgtcctctacgtcaatgatggtagtcgtgaccgcacctgggagctgatagaagagcttcaccgagagaatcacttcatcgatggactttgtctggcgggtaatgtgggacatcagtcagcgatcatggcggggatgatgacggcgcgagacttcgctgatgctgtcgtcacgattgatgccgatctgcaggatgacttaggcgcgctcgaggaaatgatcgatcgctatctggagggctatgatatcgtctatggggtgaaggtctcacgcacggcggatccactcctcaagcgcacctcggcactggcattctatcgcctgcagagtgctatggggattcgtgcgatctacaatcatgcggacttccgtctgatgagtcgccgtgcgctggatgctttggcttgctaccctgagcgcaatctctatctgcgtgggatcatccctcagctgggctatgcttctacgaccgtcgacgacgtcatcagtgagcgtgtcgctggggaatcgaagtacacgctgcgcaagatgctcctgctggcggtagatggcatcacttccttcacgacacgccctatcagctggatcatcggtatgggactgctgtgcctgcttatcagcatttgcatggcggtgtatgtgctggtctcttatatcgagcacttgtccgtgccgggttgggcttcgctgatgctctccttgtggttcattgggagcatcgtcctgctgtcgctcggcgtcatcgggcagtatatcgggaagatatatatcgagatcaagcagcgcccacgctatcatatcgctcagcacctcaagcaccatgactaaggaccaacctttacttcgcctgtgtgctaagctgcaggccttcttccacaagcctttcttttcgaatccccgcacgctctttggcctgtggacgctcttggctgtagttgcagggctgacgaagatcgcaccgcaccgccataataatttcctcatcttccgtggagtcttctggcacaccatccagaagctgtcgctgtatgacttctacccgacggagtacaacgaccacaatcactacggtccgattttcagtctcgtcatcgctccctttgcggtggtgcccgatgctattggccttctcggttggctcgtggtgctcgcgctcggtatgtactatgctgtgcgtcgcctgcccttggaagaggggcgacagatcttcctctactggttctgcgcgcatgagctacttacggcgctgcagatgcagcagttcaacatcgccatcgctgccatcatcatcggctcctttgcagctatcgagaaggggagagaagtcacggccgccttcctcattgttttggggacgttcgtcaagctctatggcgtcgtcggcttggcattcttcttcttcgtcaagcgcaagccccgcttcatcctggctctcatcggctggtcgatcgtgtgctttgtcgcgccgatgctgatcagtagccccgagtatgtcgtagggcaatacgtcgagtggtacgaacgacttgcggcgaagaacggtgagaacaccttctccctaatgcagaacatctcgcttctggggatgattcgcaagatctcgggctctgcttcctactccgacctcttggtcatcctccctgggctggcgctctttggcttgccttaccttcgcttcgggcagtaccgccacttggcattccgctacgcgatacttagctcggtgcttctcttcgtagtgcttttcagtacgggcagcgagtcaagcacctacattatacctttcgctgggatcgcgctgtggtacgcgacgagtccgtggaagcgctcgggctgggacgtagccctgctggtcttcgccttcgtgctaagtagtctctcgccttcggacctcttcccccgcagtctacgtgaggcgtatgtcttgccttatgccttgaaggcacttcctcccacgctcgtttggctgcgtctgagttacgaacttctgacgcgcgactacgccccttcgaaggcggttctatagtgccttcgtcagcggctccaataggcttcggagaaaagtaatataactttcactcgaaagtaatataacatttgcctgaaagtaatataacattgggacggaagtaatataacttccatttgaaaggtatataccctctgctcagaaggtatataccttttcttttggaggactattcctcgccgtcgtgaggaatataccttgctgtcgtgaggaatatacctttctatcggaaggtatataccttttgctcgaagggtatatacctttttgccgaagggtatatactatttgctcgaagggtatataccctttgctcctcacctctataacgcgccgtgccccgcatacctaatcccgacgggaaaggcatgcggggcacgctgaaagtagtggagtagggggcttagagatcgagtgccttgcggagctcttcgctggtgatgccgagaagctctgcatcacggcggaagcgagggatggactcttcgtggaaggctctacgcttctcagcacggatggtttctaccgccccttcgctgatatagtagccaaggccgcgcatgggatataccaggccacggagagccaacttatcataggcgtgaacgacggtgttgggggcgacctgcatcagttcggccatatcgcgcactgaggggatacgctcgccttcggtgaattgccccgtcagtacaccttcgttgatgtagtcgatgatatgggcaaagcccacattggagaatgccatagagattacttgatttggatggtcttgaggcgatggtagatagcccaggtgaggaagaggtcgatgagcccgaagaagatcaggacgatccaagcataatcacggtcggtgaggggatgctctatcgtgtaacggtatatctcctcttcgaagttgaggacgatggtgaggaagatgaggaagccactgaactctacgaacgccgcagcacacagcccgaagatcgccttgcggaagtggatcatgcagagcgtcacgagtagtggcaactgtagtcccatagagagaatagctgctgagtcttttagagataggtgcccatgaaagaactgtatcgggagtgcccattccaaaacattgctgaatcccccagggacgaagatcccaaagataccagagataatcagcgtagagagtagcgagatgaggtaatagcccaagctgagtagggcaatacttatcatcttctctccagccgaagcggggatctgggtataagcacctggcgaaggcttatgtacgcacttattgatccagatcaagatatagatgatcgtcccgatcaggtaggggccgatgactccgcctctaccatagaattcagccagttcaatgaaggcctcttggatattaaatcccctcgtgaggaaaagggtcaggaacgggaagccgaagaatgccaccgccatgatagcatggaagatgagcagtgggcgcagggagctgaagaagccttctacagtgagaaggtagatgcgcccaaatgaggagcgatgtagcgtggaggtattcatcgtagcgcttatttagaggtttcagatggagtgtgaaggtgacgcatgagttcttcgcctcggctgacgacagcattgaagaagagctccatgctgaaggtatccgccacggcctcgccttgaagtggcaggatgccgacggtgccacccagcgaaggctcagtatagagtgcgcgggcttcttcgtcgggactgacgagaccgaagtaaagacgctcggagagatcagcgatggactcattgcagtagatgctaccacgctcgaggatgacgatgcggtcgatgagctgctcaagatctcgtacttggtgcgtgctgatgatgaccgtctgctcttcgctgaggtgacgagctacggcgcggcggaattctcccttcgaagggatgtccagtccgttcgtcggctcatcgaggagaagcaggggtacacggagtgagagggcgaaggcaatcagtgccttcttcttctgcccctgtgagatcttgcccaggttcatcttccagtcgagcgagaaggtctcaatgagttcgcgggcaatagcttcatcgtagttggggtagaagggagcgcagaggtcgaagtagcgtcggatggtgacctgaggtacgtggatctcttcggggaggaggtagacctgctggaggaaggctaccttacgttcgcgtggcgtgaagccaaggacgttgatctcaccttgcttcgagaagagctggccgcagagattcttcaggagtgtagtcttgccctcgccgtttttaccgaggagccctacgacgctaccctgaggtaggctcaggtcgaggccactgaagactgggcgccctgacttgtagccgaaggaaagttgcttagttgtgatcataggacagtaatatttatatgtggtgtactgcttgtctgtaacactgcaaaggtagcaaacttttcataaggtgtatcacctatctgatatttcttctcacttctctctttacgtatatataccacgtgcctcctagtgaaggagaatcgggtaggggagctcggtgtaatcttcttatatagggtgggtttttcaaccagtactggtcactgagctgaccagtactggtcggagctcagaccagtactggtacatattacgaaccagtactgctccgatgagtgaccagtactggttcgtttcctctctcttatcgctctcatctaattgactggtatatagtctaatttgtggtgtgctatttcccctattgggatgcagctatcccaagtgtcttccagcggcgaactgatcaagagcgcagggtgcttctgatcccagtaataggtgcgtcgaaggtctactttttgagctgtcttttgctttccccgagcgattgcatcgtatttgttgtagaatggtgcttctaacagtcaagtttcgtagcgccatcttgtggttgtatgtggcaggataacagcgggttatgagtgttgttatatacttaaatattttaggaagtaagtatttgtcttcttacaacttccgaaagaatttaattattacttttgctcgcacttacaacggaacatgattactgctcgcgccttcgtgcaacagactaatcgctcctcggagctttgtgctgctctcaacctgaatggttgggggctttccttcgttgctataccttatctacttcaagacggggctattgatacggcttatgtattgatccccgtaccgtctttccctcaatcagtcgtttgctcactgctgccgcttgtcccacaaggtgctgcacaggggagcttcgcagccttttctctctaatcctaaaaagagaaagtacagaggccaagaccactctccgcttattttttagttttaaatatgaagaaagtactatctatcctcatgatcctcttccttacggtcgctaccgcgatggcgcagggaaagagcatcagtggtgtcgtcctcgatgccacgaatcatgagcctgtgatcggggcttccgtcctggtcaagggcgtacaaggtcaaggtgcttccacggacatcaacgggaagtttaccttgaagaacgtgaagtcaggtgccgtcctcgtcgtgtcgtccatcggctacaagaagacggaggtgcctgtcggcaaccagacggagctgaagatcgagctctccggtgaagacaaccagctccaaggtgtcgtcgtcaccgctctcggtatcaagcgctcgcagaaggctctgagctataatgtccaggagatcaagaacgatgctctgacgacggtgaaggacgccaacttcatgaacagcctcaacggtaaggtcgctggtgtgaacatccagcgtagtgcctcgggtgtcggtggtagcacgcgtgtcgtcatgcgtggtaacaagtcgatctcaggggataataacgtgctctacgtgatcgacggggttcctgtcggtaacagcgctgaccgtggtggtgacggctctggcttcggtgcaggtcgtgcttcgggtgaaggtatctcaaatatcaaccctgacgatatcgagtcgatcagcgtcctgacgggtccttcggctgctgctctctatggtgcaagtgctgctaatggggttatcctcattaatacgaagaagggtgctgcaggtcagctgcgtgtgaacttctcttcttcggtagagacggcttcgcccttcatcctgcctaagttccagaatacctatggcaatcaggctggtcagtacacctcatggggtgataagctcgctactccttccacctataaggtacgcgacttctacaaccgtggcgtgacgttcaataactcgttcaacttctctgttggtacggataagaatcagacctacttctctgcctctgctatcaatgctaaggggatcgtacctaacaataagtaccatcgctacaatgcttcgattcgtaatacgtcgaagttcctcaatgataagctgacgctggatgtctcggctaactacatccgtgactacgcgaacaacatgatctcctacggggcatacttcaatcctatcgtaggtgcttatctctatcctcgtggtgagaacttcgaccaagagaagtacttcgagcgctacgacgcagagctggggtacaatgtacagcagtggaagcctggtagcatgggtatggacgtgcagaacccttactgggtagcataccgcaatctgcaccccgaggttaatgaccgctacatgctcttcggctctctgaagtatgagctgaataagaagattaacttcacgggtcgtgctcgtctggataacaccttcactgagcgtgagacgaagctctatgcttctacctccagcgtcttctctaagcccctcggttacttctcttctgatgtcagctacttcaagcagaagtatgtggacttcatggcgaactacaattcccctattgctcaggacatcaatctgacggctaccctaggtacgtcgtatgaagagtatgacaataagggtcagggctttggtggacacctcttccttatccctaataagttcatcttccccaataccaatcagctccagagcggtggctcgcagtcctctacgcgtaagagtaatttcgcagtcttcgcttctgctgaacttgcttggcgcaacgcgctctacctcacgcttacgggtcgtacggacaagccttcgcagctcgtcggtagcgtagatccctggatcttctatccctcgatcggtctctctgctgtcgtcaccgaccttatctctgaggacctgcgcgctaagctccgtcctacgctctcttatctgaaggtacgtacctcttatacggaggtgggttctcctatccccttcactggtctgaccccaggtactatcacgcactcgatgagcagcggtaaggtcgagcccttcgactactatcctctgcctgacctgaaggctgagcgtacgcgctctatcgagctcggggtcgactcccgttggttcggtggtgctctgacctttggtgctacggtctatcagtcaaatacgctcaatcagctccttgagaccgacctcgatccaggtacgggctataagaagctctatgtacaggctggtaatgtccgtaaccgtggtatcgaaatgacgcttggcttcaataagaagtttggtggctttgaatacaactcaagtgttacggctacggctaaccgcaataagatcctcaagctggcttctggtgtcacaaatcctatcacgcacgaggtctttgacctgaaggatatcgtcaagggtcgcttccgtctgcgtgaaggtggtgagctcggtgacgtttacgctagcgagcgcatcaagcgtgatgctaatggctatgtagactatactccaggtcagtctctggtcacggagccaacgactccttataagctcggttcggtcaatgctaagtggaatctcggctggaagcacggcttctcttataagggcttcgacctgaatatgctcttcacggctcgtcttggtggtatcgtcatctcgaagacgcaggctgctctcgacaagtttggggtttctcaggcttctgctgatgcacgtgatgctggtggtatcaacatcggcgaaggtcttaccatcgctccacagcagttctacgatgctgtctacaacctcgactcctactacgtctactcggctacgaacgttcgtctgcaggagctgagcctctcttacagcctgcctaagaacttccttggcaagacctttaagaatgtagctctctctgtctacgctacgaacctttggatgatctataataaggctccttacgatcctgaactcacgggggctacgggtacgtttggtcagggctatgactacttcatgctccccagccagcgcactatcggtgccagcatcaaggtcggcatctaagtcgagtacttatcttatcagataaagaagaaatgaaatgaagaacttcaagaaattagtccttcccgctttggcgatggcctcagcgctggtcttcgcctcctgcaatcaggaagatatcaataccagccgtgtcggtgttaccgatgaggagctcaaccagggtggtcttgcttatggcttggctatgatgagccttcagcgctcggtcatgcctatcggcgtcgctggcgaaacggggcctggtaatagcatgcaggtcctcgagcttatctctacggggaactatgtaggctactacgggaataataataactggaactttaacacggaaggtacctggacgttcaccaatggacgtatgagcatcctctacggtctcctctacggggatgtagcgaaatcttggctccccatccacatccaggcaagccgtgctaaggataacctgcaggctcagcaggtcctggcgatggccaatatcgtgaaggttgtgggttggctacgtgctaccgatgcctttggccctatcgtatatacgaaggctggtagcggtgacatcacgcctactcctgactctcagcaggaggtctataagggtatgcttgcggatctggagaagagtgcagcagtcctacgcgaagctcgtgagtccgttctctcccgtaatgatctcgtctataacggtgatgccagcaagtgggttaagcttgcgaactccctgatgctgcgtatggctgtccgtgtccacttcaaggatgccgcactggctaaggaatacatcgcaaaggctttggatgcttccaatggtggcgttattgagactacggctgacgaggctaagatcggtaactccgataagcagcctctggcacacccagcactcatctctgtagatcagtacaatgagacgcgtatgggtgctactatctggtcttacctccagggctacaatgacccacgtcttgagaagtacttcacgaagggtacttaccgcaatataccaggctactacttcctccctccgaccaacaacgagtcgaagaaggaaggtgctaatactgctcagtacgcttcgaagcctaacttctctacggaaacgcctctctactggttccgtgcttcggagacgttcttcctcaaggctgaggccgctctttacggtctgatctctacggggacggcacagtcttactatgagcagggtgtccgtcagtccttcgccgaagctggcgctggagatgctacggcttatctggctcagacgggggtattgcccgctgcaactaccgtagcttacaacccttacctttcgagcagatatagcgataacatctcctctggtaatgtctctcccaactggaatgatgtagatgctactcgtaacctgcaggaagtacagcttcagaagatcatcacgcagaagtaccttgcgctcttccccaatgcttatgaagcatggacggaatatcgtcgtacgggctatcccttcatcatgaagccagctgataccggagctccttcgcgtatcggtggagatgccagcatgcgtgctcctgagcgcttctccttccctgcatcagcttacgatagcaaccccaacctcaaagtcatcccctctctccttggtggtgtggacctcggtaagactccgctgtggtgggtgcgtgacaatcgtcctaatcagtaactctaaaacgaatcatctatgaagatgcttaaatatgcgcttgtcgcagctatggccctcgcctctgtcgcttgtagcaagtggactgatgatgagcgcttgaccttcgacaatcagaaggacctcaagcgagccattcccttcattgagttgacgagtgccgatcagctcaccgcagagcaacagaagtattacagcgagctccgtgcatggaagcagacgcctcacgtacgtggcttcggctggttcggtggctggacggctaagggtacggatccacagaagtacctccgtatgcttcccgatagcgtcgatatcgtatctctctggggtacgcatggcgagctgaccgaggatcagaagactgacctcaagctcttccaagacgtcaagggtggtaaggtcctcctttgctggattgtttctaatgtcggtgaccagcttactcctaagggtaagaccgctacggactattggatcacggagaagggtggtggtgacttcctcgaaggtgtcaaggcttatgctaatgctatctgtgataccatcgagaagtacaacctcgacggcttcgatatcgactacgaaccctattatggtggttctggtaatctggctactgctcttcagtcttatgaagatggtggtgagacctatcactatgactggaagaagtatcccgctgctgactatgtaggtgcagaggcagatatcattgatgcctcttcggagcgcaatatcggtatgtacaccttcgtcaagacgctctatgatcgtcttcaccccaagggccgaatcatcctcttcgacggtgagccttataagctctccaccgaagcctctaagatgattgacttctatgtctatcaggcttatgatgagtctacgacttatgcagctctgaataaggttcgtcagggctcgaagctcgacaactgggagggtaagaccttcctcacgctggagttccagaagtactctaagacgggtggtttccctcgttatacgagctctaaccctgagattcagaagctggatgccggtcgtcagatcatggactatgctacgatgctcatgcctaatggcaagcgtatcgctggtatcggtacttatcacatggagcttgatacggagggtggcagttatcgcttccttcgccaggctctcaatgccggtaatcgcgtcagcgacacccagaaggcagacttccaataatggctaatagagaaaacaagagtttgatgaaaagaatagtatatgcgctcctcgcagcaagccttcttggtagctgtcagaatgagctttacaacgatcccgcaaaggatcatcagagcgagcaggggatctatatccacggtcaggagcagacgcagatcttcctccttagtggtgcatcgcaggatgcaaatggccctcgtgtaagccttgtcaagcctgctacgtctaccgtcacggtgaacttctccgtcggctcacaggcacagctcgacgcttataacgctaagaacgggacgagctacaagcttcttccttcgacgatgtatgagcttcctgcttcggtgactattcccgcaggtcagacctcggcttcgatccccgtcaagctgaaggcagttaccttctcaagtggtgaagtcttcgctctgcccatccagctgcaggggagcaatcctcacgctatcggcggtcaaagtgaagcgatcatcgtcgtcgaccaagctaccgagacgaaggctctcagcatcaatacgggcaatgagatcgctgcttacttcgcagaagatatccttgttccccagtggacgatggaagtcatggtcaagcgcagcaatatcaatggtgcacttgctggtacgaagttcgtcggtgcttcggatgacaagagcgaaatctaccctgtcgtcggcaaggatggttcgttcttccgcacgggtggtactgacctctcgctctcgaaggatatcatgcctctcgaagacaacaagtggtacatgttctccttcgtctatgacggggcgaacgtctcagtctactgcaacggccgtcaggtgctttcgcagcctgtacgcgatggagactacaaacttggtggcttctggctcagcaccacgcgtggtctgatgcgcgaactgcgattctacaaggtcgcacgtaccccagctcagatcgcagcaaacgtctggaagacggttgatcctaaggatacgaacctcgtagcatactatcctatgaatggtaagaagtatgatcctgctacaggtaaggtcacggaggatgagactcagatctgggactggtctgctggtgcacaccacttccccagcctccagggtgctaccttcgtcgacaatgcaggtaagcccttccgcttccctgttatggagtaagcctcttcggtaatacttccctcatgatccgcccctcgaaggtccgtccttcgaggggcggattctttttggagggaggagaaagggggaagaagagtaggggaaagcaaagcctctccaagctacttccccgagcgcaataaggtgtatgcttcccaagggtatataccctccttccaaatgtcatattacttctcactgaatgttatattactttcagtcaaatgttatattacttctcactgaatgttatattactttcggtcgaatgttatattactttctgacggaagttatattacttctctccgaatgttactctacttcttccagaaagtagaggtatttctcccgaaaagtagaggtattttcattgaaaagtagaggtatttctgagggaaagtagaggtgtttttttcagcgagtcattgaagaggatagagacggggcaatggaagggcgaatgaacagcttttgcttcgctccgaaggtgcttcgaggggtgggcgtgagtagtgcttcattcacttgcttggtgaatgcctttgcacacgtgctatacggtggaattgcgctatttttgtcggggcgatatccgcccaacctcaagcttacacgacaagtaatggcaagaataatgaccaaaaccggagacaagggaaccaccggaatattcggtggcgagcgagtccccaaagatgatccacgtatcgaagctaacggtgcgatggacgaactcaatgcccaccttggattgataagagcccacatccctacggaagatccccgtcaccgcttcttcggcgaagtgcagatgcgcatcatgcaagccatgagccttatcgctacacgtagcgagcgccgcgaagagaatcccaaccacttcgacctgcagtgggtcgaggagttggaagctgagacggcgcgtctgatggctgagatcccagagaatggcttcttcatcctcccgggcggcacgatcctctcggccgaaatgcagctggcacgcaccgtcgcacgacgtgccgagcgccgcttatggaccttggagcgactggatccacttcccgaggggctgatcccttgggtcaatcgaatgagcgactggctcttcgtctcggccaaatgggagatgcatcagcagggctggccagaagatcgctggcaggccttcagctacaagcgcaagaaaaagcagccaacccccgctgaataatggataagatcgagagcaaacgactggcaccgctgatgctcgtcggtacaggaagtgacgtggggaagagtattctcacggccggattttgtcgcatcttcaagcaagatggctacagacctgcaccgtttaaagcgcagaatatggctctaaactccttcgttacacccgagggattagagttgggccgtgcgcaagctgtgcaagctgaggccgcaggtatcccttgtcatacggatatgaatcctgtgcttctcaagcccagctcagataagacgtcccaggtcatcctgcatgggcgccccatcggcaataaagatgcgtaccaatacttccgtaccgtggggcgaggtgagcttcgtggcgaagtgcatgctgcctttgatcgcttggcttctcgctacaaccccatcgtactcgaaggtgcagggagtatctccgagctgaacctccaggactcggacattgtgaatatgccgatggctgcgtatgctggcgctcgggtaatccttgtcgccgacatcgatcgtggaggagtcttcgcctcagtctatggctcgatcatgctgcagaagcctgagtggcgggagctgatcgtaggagtcatcatcaataagttccgcggtgacctgcgtcttttcgacgaagggcgccagcttctggagtcactttgcggcgtgcctgtacttggagtcgtaccgtacatgaatgacgtgcacatcgaagaagaggattccgtcgccctctccaagcgagctttctccgctcagcaggggaaggtcaatgtggcagtcgtattgcttcgctacatatccaattacaccgacttcgcgcgcctcgagcaagatgagcgcgttcatctcttctatacgaacaatgtagaggagctgcagcaggcagatatcatcattgtgcctgggagcaagagcaccctctcggacctgtatgagctgcgccgcaacggagtagctcaagctatcatccgcgctcaccgtgcagggaagacgatcctcggtatttgtggcgggtatcagatcttaggccaagaggtttacgacccagatggggtagagggtgacttaactcgtctgccaggcttaggcttgctcccgatcgcaacggagatggctgccgagaaggtaactacacaagcgaccttcactctcatcggtagcgacgtcccctgcagtggctatgagatccatatggggagaagccgtgtcgtagatggcttcgatgcctcgcccttagtcaagatgtctgatggccgtcttgagggctactgcgtcggagatcattgtatgggcacctacctgcatggcattcttgacaatgagatctttatcgagcgactgcttcagcccttcgctgagcgccttcatgagcaagctgcggggcaagactatgccaccttcaaggaaactcagtacgacaagctcgccgaacacctccgccagcacgtcgatctggagcgaatctatcagctacttgagcgatgagagacggacacggcgatgacctccaccgctatgagcggatacgtgcgaacttcagctcaaatgtaacgagcctcacggacccgacttcgctgcgggaatacctcagaggagagatcgatcgtattggttcgtaccctgagcctacggcagctttacttgggaaatcgcttgcgaagcatcacggattagctgatggcgaggtgctcgtgacaagtggtgcgaccgaagggatctacctcatcgcacaggcttatcgagagcttgtacattattatagccctgatccgaccttcagtgaatatagagatgcgggaagactctttgcacgtgagcagcgtgagctggagactttcgagcccggtcaagatgctcctgcgggagtctattggctttgctcgccgaataaccctacggggcaggtctattcgcaggacttcttagagtcactttggagtcgctacccgcagatctacttcgtcatcgatagctcctacagctacttcacggaggctgctcttcctgatccccaagaaaccatacggcgcttccccaacgtgatctttgtcgcttcgctcacgaagcgctatgctatgccgggattgcgcttgggatacgtgatggcacacagtgaggtcatcgaccgactaagcgaatacgctgcgccgtggtcagttggatcgctcgccatctcagcaggagaatggatcgtccgtaatgacttcccgcacctactggaccgacgtcagctctttgtagagagtgagcgtctatggaatgccatcaagtcgctcccatacttcgatcctcagccgacggatacgcacttcttccttgtgcgttgtactcatccagcgataggaagtggagccgagctgaaagagatcttagcgcagcgctacgggcttttggttcgtgatgcgacgaactttggctactcttcccccacgatacgtattgcagcgcagcgccccgaggagaatgatctgctcatcgctgcacttaccgagctctcctcttcacttaagcttactttatgatccgagtagaggtcatcatccccttagccttagatgggctctttagctacgctgttcccgaggcgcttattagtgaagcgcctggattcagcgtgggttgtcgagtcgttgtgccctttggtggcaagcgatactatacgggggtggtcttctctatggataaggaggcggagatatcggcatataaggaggtcgagcaaatcctcgattctgctccgatcatccccgaagctactctgaagcaatgggaatggatggcatactattatgcctgtccgctgggctccatccttcgagatgcgcttccctcaggactacttcccgagagcaagacgatgctttcgcttgtggaaggctttgaggcagaagacgcacttcctcatgcggagctactcatcttagatacacttgccgagaagggggcgatgacgacggagcaactggagcgacttgtcgagcgaagacttactcgcccgctcctccatctcatagagttgggagcggtacatactgaggaagcgctccagccacgctatcgtccgaagctcgcccgctatcttcgtcttgcccccgaatatcaagaagatgagggagctctatcaactctcttcgatggactctctcgtgcgccacggcaagctgagctattgatggccttccttgaggcgcttcgagagacgggacaagatcattcaggcgccttacaccgctccgtcttgctcgaagccgtgccaaagagcgaagcacaactacgtgctctcattgagaaaggtatcttggagcaggtcttagagcctgtaagtcgactgcgagcagtggagccttcaagcagagaatcctctattgctgatatagagccattgacccatcccgtgacactctattatgggcatacggcagaggataaagagcgctatatcttggggcagatcgctgcgactctggctcgtggtggccaggtgctctatctaacgtcttcggtgcattcggtcccttcggcagctggctttatgcagcgacttgccgagatcgcaggagccaattactatccctatcatagtctcatcggtgaggcggtgcgagtggagacgtaccttcgtctctctaagctcgatggccctgcacttgtcgtggggacacgttcggctatatatgtgccgcttcctcgcttatctctggttatcattgacgaggagcaggagtatctttataagcaacagctcgtagctccacgctatcatgctcgcgatgttgctctttggcgagcacaccaatcaggggctcaagtgctccttacttccctaacaccttcggcagaagtactcttccatgccctgcgtggaaagtatcagctactacgtcccgagtctttcccagcggagactagttcgcaatcccagcaggtattacccaccatagagctcattgatcttaagcgcctacggcagctacgtgaggtcgagtggggacatacgctgacgccctacctccttgaagagattcgctccacgatagctcgaggtaagaaggttctactcctacagaatcgtcgtggctacgctccttatgtgacgtgcgatgcctgccaaacccgcctgctgtgcccgaactgtgatgtgagtcttacttatcaccgcactcgcgcagcgctactctgccattactgtggttacacagctacgctacccgaggcttgtccgagctgtggagccattgaagtcgcgacaaagtctggtcttcgtcctgcgcttcgtcaagtaggatatggcatcgagcgtgtggaagaggaactcaaggagaagcttcccgcctatgaagtgctacgtatcgacagcgataccttttcatcgcagaagaagcgtatggagctactcgagcagatcgagtcgggaagtgctgagattctcttgggtacccagcttatacgcaaccaaccgatatgggagggtattggcttaattgccgttgtacagcttgatgctgtcttaggtgtaccagactttcgctcggaggagcgtgcctatcagctgctccatcagcttagacttcgctcccgtgctcctcgggaagactgccctcgctacttgatccaaacgagtagtacggagcaagccttcatcaaggcgctgcaagtaggtgactacgatgccttcatcaatgaggtacttgcggagcgtgaagcaacgaacttcccaccattcactcgcctaacgcacctttggctacgagggaaggatgagcgcttactggcctctgcagccttagtcctctcgcagtatctcaagggactgctccctaatgagcgcgtaacggatccacagattcctgatttagctcgcttggaaggctactaccagaggcagatcgtcatacgtcgtcctttccagcagtcctaccgagaggagcgcgcagcctttgcttcagcactacagcagctacggctctccatgcccgagagcaagcgtctgcagatcttcttcgatgtagatcccctctaacttcctcgcgaagcgctcctatacgacaagggcgaaggcttaccataagccttcgcccttgttgctttgatgtggggtagttatccaatgattgtgcgttcaccgaggaggtcggagaggcgacgcttctggacattgaggcgcgtgatctcggtcatacactcaaggatctttgtgctgtcacctgctcgctgggcttgcttgatctcctgatgtagcccgtcaatgaatcgcactaagagcgccatcttatagctgttgcaagcgcgtagggcaagtgaacccaagtagcgagcttctttgcgggcttcttcttcgcgctcttcctcttcgctgaggatgcgggaggagaaggagctaccagccccaccgatgtggagatcttggtcggggcggtattctaagagatcgctctcggcaaggagagctgtcgtaatctctcggagtggcgcctcgggatggttggcaaagtaggtcgcaggggagatctgcttctcgagacactcactgcgaagctcagccatgaagcgggcaaagagtggggaatactcttggtctgcgccgaccatgatgagctcgcgctcgatgaagtagctgaggataaaagtagagtcctgctcgggataaatctcgtcttcgaactctggagtacccaagccctgggggatgatgatctcacgatcgctgtagagtaggagcagctgcatgagttcacgctcgaagggcttgatactttcttcgacgaccagcgggctgagatattcatcggatgacggagcaggctcggtgggtgtcggctccgtgaagggcggagggacaggtgcagatggagtcgggggagcgactggcgctgtacgctgcggggaggtgaagccctgagcggtcacaccttgacgtcggagcttattgacctcggactgcaggagctcttcgctcattctcagagctgtcgaagagctttgtatcagcacagcacgctggatggtgtcggggatgagtgcgatgctgcgcatgatgtcggatatcagctcagctcggcgcaggggatcccgctccatctcctcgtgataaaggtcgatcttgaagtgaatgaagtccgtctcgtgctcatccaaataggcttgtagctcggtattgctgtggctacgtgcgaaggagtcggggtcttcgccatcgggcaggagcacgaccttgatgcggaagccttcctccagcaggagatcaataccacgcagggcggccttgatccccgcggcatcgccgtcgtagagcacggtgatggtcgtggtgaagcgacggataaggcgtatctgatcgatcgtgagggctgtacctgaagaggagacgacattctcaatccccgcctgatacatagataggacatcggtatagccttcgacgaggtagcacttgccgagcttggagatcgcgctctttgcccaatagaggccgtagagctcacggctcttcgagtagatgaggctctcgggggagttgacgtatttggcggtcttagccgtcttactcatcacgcgcccaccgaaggctacatagcgcccactgaggttgcgcacagggaagatgacgcgcccacggaagcggtcgatagccttgccggggtggtcttcatattcgatggatagtccgacttcggcgaggcgcttcagcgggtagcccgacttgatggcttgctccgtgaaggcagtcttcgactcgggggcgtagccgaggccaaagcgctcgatggtctcagggcggatgccacgctcgcggaaataggcaagtcccaccgtacgcccttcctcggtctcggtaagctgcgtctggaagtacttcgctgcgtagtcattgatgatgaagaggctctcacgctcgctattgcgctgcttctcctcttcgctctcctcgcgctcgacgacctcgatattgtacttcttcgccaggtacttgagcgcatccgaataggagagctgctcgtgcttcatgatgaagttcagcggcgtaccgccttcgccacaggagaagcacttgcagatattcttagcaggattgacgtagaaggagggattcctatcgctatggaaggggcacagcccgacgtagctcacaccttggcggcgtaggctgatgaagtcgctgacgacatcgaagatctgtgcggagtcgaggatgcgctgtcgggtctgctgatcgatcacggtcgggaggaggctatggggagggattagagtggaaggcgcttgaggtcttcgggcgtatcgatgccgatggactcttggtcagagagcataacacggatgcgcagcccagcctcgagccaacggagctgctcgagacgctcgttctcctccagtggggaggcggggaggctctgtatcttcgggaggacgtgggtgcggaaggcgtagagcccgatgtgcttgaggaaggtatgttccttcgcccaaggcccttcgactgagcggagataggggatgacggagcgactgaagtagagtgcatagcccgtggaggtgctacgcacgagcttgacggcgttcgggttagccagctcttcgttggtcgccgtggaggggaagggctgggctaaggtcgccagatctaccgaggggtcgtcgaaggccgagataaggagtcggatctgctcgtcggcgatgaagggctcatctccctgtagattgatcaagacatctgcgggctctccgaggagctggtaggcttcgaggcagcgctcggtgcccgactggtggtcgggcgaagtcatcacggcgcggtagctccgctcggtgaccgtggagaagatccgctcatcgtcggtggcgacgacgacatcggggcacacagcgagggcgcgctctacgacacggatgatcataggcttacccccgatatctacgaggggtttgcctgggaatcgggtcgaggcgtagcgggcgggtatgatggtcaggatgcgcatagcttgaagttgcttgattgtcttgtagtcggtgaagcctctgcggactcactgtgcaaagatactatcattcgtggagcatctcgcagtgcgggctgatgtcgtgccgaggcgagtgcgaagcgagtggatgcccgtcgctttatcgcgtgagagaaggtgaataggagcgcccatagcttggggaaacccctgcgtatatgcgcaaagaaattttcgcatatacgaaaatttatcgctgtgtgcacagagatttatcgccgcatattcagcgccttctcagtgggtattcccgaggctttttagccttcctcttcccggtcagaaagaccatccccctgaagcactctgaggagcctccagggggatgagctattagggagagccttgcgcttacttgtactcggcccagctcttgatctgcagatcctcgatggggagcgtgcagaaggcggtgatgaaggccgaagccagacgagcgttggtcagcagcgggatgttgaggtcaatggccgcgcgacgcagacggtatccgttggtgagctcgccagcggtgaggttcttattgatgttcaccaccatgtcgatcttgcgctcatgcaggaggtcgagggcttggggctgcttcccttcgtcggtaggccagaagaccagcgtagaggggatgccgttctcagccagcatgtcgtgcgtaccctgcgtagcgtagagcgcatagcccttgttgtgcaggagctgggctgcatcgagcatgtcgaccttctgcttgtagccacccgtggagaggaggacggagcgctgggggatgcggtagccgacggagagcattgacttcagtaccgcttcgttcgtatcgtcaccgaggcaaccgacttcacccgtactcatcatgtcgacgccgagcacagggtcggccttctgcaggcgagcgaaggagaactgcgatgccttgatccctacatagtcgaggtcgaaggcgctcttattgggcttctcaactcgttgcccgagcatgatgcgcgtggcgagctcgatgaagttaatcttcagcaccttgctcacgaaggggaagctgcgtgaggcgcggaggttacattcgatgaccttgatctcgttgcccttggcgaggaactggatattgaacggccccgagatgtgcagcgcttcggcgatctggcggctgatgcgcttgatgcggcgtaccgtctcgacgtagagcttctgacctgggaactgaatcgtagcgtcacccgagtgcactcctgcgaactcgatatgctcgctgatggcgtaggcgacgatctcaccgcgctgggctacggcgtcgatctcgacttccttagcgtgctcgatgaactggctcaccacgacggggtgctccttggatacatcggcagccagctcgaggaagcggtagagctcttcttggttggagcagacattcatcgctgctcccgagaggacgtagctgggacgcactaagacggggaagccaacctcggcgatgaactggtcgatatccgagaggctcgtcagctcctgccagcggggctggtcgatgccgagctcgtcgagcatggcggagaacttgtgacggtcctctgcattatcgatgtcctcagcctgcgtcccgaggatggggatgcgctgtgagtggagcttgagagcgaggttgttggggatctgtccacccgtagagaggatgacaccgcgtggtgtctccagatcaaggatgtcaagtacgcgctcgaaggttagctcatcgaagtacagacggtcggtgatatcgtagtccgtgctgacagtctcggggttgtagttgatcatcaccgagcggtagccttgctcgcggatcgtctgcagggcgttgacaccacaccagtcgaattctaccgagctcccgatgcggtaagcacccgagccgaggacgacgacggagcgtccgtctccctcatagttgatgtcgctgtgcgtgccgctataagtgaggtagaggtagttcgtctctgcgggatattcggctgcaagcgtatcgatctgcttgacgacggggacgatgcccagctgcttgcgctgggagcgcacggcaagggcttccttgtccccagccttcacgcccttatctgcgaggacgaagcgtgcgatctggaagtctgagaagccctgacgcttggcacgaagcaggagttcgtaagggagcttatcgatagcagcgacttcaccgaggcgctgggaggtgcggacgatactctggagcttgtcgaggaaccagcagtcgatcttcgtcagcgcatggatttgctcaatggtatatcctgcgtgcagtgcctggctgatggcgaagacacgcgtgtcggtgggtgccttgagtgccttatccagctcgtcagcggggatctccttcgtgttgttgcctacgaagccgtgcatgccttggccgatcatacgcaggcccttctgcatcgcttcctcgaaggtgcggccgatagccatgacttccccgacggacttcatgctactgccgagctcacgagatacgccgtggaacttccctaagtcccagcgagggatcttgcacacgacatagtccagtgcgggctcgaagaaggcgggggtcgtgcgcgtcacggagttcttcagctcaaagagtccgtagcctaagccaagcttagcagcgacgaaggccagcggatagcccgtagccttagatgccaaggccgaggagcgcgataggcgtgcattgacctcgatgacacgatagtcttcgctctcggggtcgagggcgtactgcacattacattccccgacgatgccgatgtggcgcacgatacggatggcgatctcgcggagcttgtggtattcgttattcgtcagcgtctgcgagggagcgacgacgatactctcaccggtatggataccgagtgggtcgaagttctccatattacagacggtgatacagttgtcgtagcagtcacgtacgacttcgtactcgacttccttccagcccttgaggctcttctctacgaggacctgaggggagaaggcgaaggccttactgcatagctcgtcaagctcagcttcgttgtcgcagaagccgctacccaagccaccgagagcgtaggcggcacggatgatgacggggtagcccagctcttgggctgcacggcgtgcatcttcggtcgtctctacggcgtggctctggatcgtcttgacgctgatctcatcgagcttgcgagcgaagaggtcacggtcttccgtgttcatgatggcctcgacgggcgtacccaggacctcgacgttatacttctcgaggacgccgctctgatggagtgctacaccgcagttgagagccgtctgtccaccgaaggcaaggagaattccctgaggacgctccttctcgatgaccttctcgatgaagaagggggtgacggggaggaagtagatctcgtcagcaatgccttcggaggtctgtaccgtggcgatgttggggttgacgagtacggtgcgtatcccctcttcgcgcatggccttgagtgcctgtgagccggagtagtcaaactcgccagcttcaccgatcttcagtgctcccgatccgaggagcagtaccttctgtatcttattcttgtcgatcattgtctcgtgctattgggaggggtaattaaagcaggttgaggaactcctcgaagatgaagagcgtatcggtcgggccactgcaggcctcggggtggaactgagcagagaagaagggcaggcgctcgtggcagatcccttcgttcgtgccgtcattgaggttgacatacttctcacgccagccctcgccgagggtggaggcatctacggcatagccgtgattttggctggtgatgaagcagcggttcgtacctacctcgcgtacaggctggttgtggctacggtgtccgtacttcatcttgctgatctttgctcctgcagctgcggcgaggagctgattgcccatgcagatcccgcagataggcttctccttagcgaaggccttgcggatatgctcgacggtgacgctacacttattggggtcgccagggccatttgagaggaagagcccgtcgaaatcaatctgattgaaatcatagtcccagggtacgcggtagagcgtgatctctgggtggatgaggttgcggacaatattgttcttcgcaccgcagtctacgagcacgaccttcttagggccattaccatagatcgtgacctccttgggagaagcttcagctacaagattacgtgcgttggggtcatcaaacgggatatcttcgcagccctcgaggagaatcttccccttcatcgagcccttttcgcgaagggtcttagcgagctcacgcgtatcaatgcccgtgaggccgaagaccttctcacgacggagccagtcaccgagtgagccctcagagttccagtggctgtactcctcggagtagtcggagacgatgatccctaagggatgtatctcatcactctcgcggaagaaggctataccgttttcatcgtgcttgggagaggggacgccgtagttacctaccagagggtaggtcatcacgaggatctggcctcggtagctggggtccgtaaagctctcggtgtagcccgtcatggcggtgttgaagacgacctcgcctgctacgggggcttcgtagccgaaggaatacccctcgaagcgactgccgtcatcgaggattagggtagctctcttgtagtcttgcataggatggatactttgtgagaatggagtgtagaagggattgctcgaggcttttataaagagaaaagccgtctaccaagcagagcttgacatccggctttcttatatcttgtgtcgctcgtggggagcgaagacctcagtatcattgacgtgattagtgatgctacgcagggcctctttagctctgctttgcacgcaaagatagctaaaaaagcggaaccgcctcgccccttgctccacgatcgaagtggtagcgagaggggcgaggcggtgccggtagggggattagagaccgaagcgctggcggagcgtgtctacgtagtccagcttctcccaggtgaagagctcgacttcgtgggcgacattgccacggctattcgtcgagaagtacttcgtgaccttgcgaggctcgcggccgaagtgcccgtagctggctgtctcacgatagataggagcacggagcttgagacgctgctcgatagcataggggcggagatcgaagacctcgtctacaagcttggcgatctctgcatcgctgagggagacgtggctcgtcccattcgtgttgacgaagatgctgataggctctgcaaccccgatagcgtaagcgagctgtacgaggacttcgtcagcgacgccagcagcgacgaggttcttcgcgatgtggcgagcagcataggctgcagagcggtctaccttagagggatccttacccgagaaggcaccaccaccatgggcagccttaccaccgtaggtgtcgacgatgatcttacgccccgtgagaccagtatctccgtggggaccaccgatgacgaacttacccgtggggttgactaagagcttcgtctcgctgtcgaaggcacgctgtacatcctcagggtagcgcgctaagacacggggtaggagtacgcgacggatatcctccgtgatgcgtgcctgcatctcagcatcagcgatggcctgtgcttcggcagtcgcatcagcaggctggatgaagtcgtcgtgctgggtgctgatgacgatcgtgtcgatacgcaggggcttaccttcgtcggagtactctaccgtcacctggctcttagcgtcggggcgaaggtagggcatgaggtgaagctcttccttgcgaatgcgagcgagctcctccaggagggcatgggagaggtcgagggtaagaggcatcagagagggggtctcacggcaagcatagccgaacatgataccctgatcccctgcaccctgctcctcgggagcggtgcgctcgaccccgcggttgatgtcggcactctgaccatggatggctgagagtacgccgcagctatcggcgtcgaagcagtaagcgctcttgttgtagccgatctcacggatgacgtcacgtgcgatgtcctgcagctctacataggcgtcgctcttgacttcgcctgccagcacgacctgtcccgtcgtgacgagcgtctcgcacgctaccttggagtgcgggtcaagcgccatgaagtggtcgaggatggcgtccgagatctggtcggctactttgtcgggatgtccttctgagacggactcagaggtgaagagataactcatcttatattgattgaatgggttggttaaatatgtcccgtgcccttgggtggatgcgaaaagacctcagctgcgttgaggtggcaaccaaggtcgaagcgctaagtctgtcgtaagggatgggagctaaggtattggctctatctggacgacgggtttagcattttttctcgtggttgcaagcatctcaaatctatccacgtcccaccgatggggcaccattttcggctgcaaagttaacctttttcttgttatttcacctacgcagtataaaaagagtgtagcggctccgtatcaaaatgagaggggagtatcgtgcccgtttctaccacgaaaaggtagatccttcggtgagatagccccctaaggagattgttgcacagagtcctgtttcctatttagagtgctaaggcatcgtgcgcccagctccccgctacacctctccgaagtgaccgagcaagccctacgccttatcacatatattcctcttatcctgcgaagggaaaagtgtccttctcgtgaagggaaaagcgccttcacgtagtggtttttcagcatctatgcacgtagtcttaaagactaggtacgtaaatccaaatgtccacgtacgtagatattagagccacgtacgtagcccaaacttatttgccactcgtccacaacttttatccctacgcggagcaacaacctactctatataaccatcaaatgtgcagcagtaaataagcctctattatgacaagctttcagactccgcaccttcatacttgctaacacagcagacgctcttcgctcgttgtgggcgtggactaattcggtaggaggagacagagtgtacctttctcggctttaagattaaacaattgagaccatatagattgatacgcccccttcagggatgtgcttaagaaaagcctataggagagggctgataccaagctcttgctcggctacaaaggaaacgccctgctcgcacatctgtgcgggcagggcgccgtcctcttcttagaagatataggtctgtggaagtgatttacttcttcttacagcaggactttgtggtgtcttgagtcttagggtggcatacagggcaagccttatcggtgcagttagcgtggttgccttgactcttgcaagttgacttcgtggagtcttgtgccgtcttatcgtggcacttagagcaagtcttcttgctgctcttagcttgcttgccatcagtcttgcagcaggactttgtcgagtcttgcactgcagcgtggtgtgcttcgcataccttggcaccttcgggtgtcgagcaggctgcacctgctttgcagtcacactgcttgctcttgcctgagcagcatttggctgtagcttccttctttactgaatccgtcttggcggggctttgggcggagaggctggtgccgagcgcgaagatacacgctgcagcgaggatgaacttcttcattattcttggtaatgaattaaatgtaatgagtgattagagattatttaagggcaaaggtagtgaaattgcttagccgtgttatcttattggtaaatggagctattgatgctatatatata

SEQ ID NO: 77 - DNA, 38240 bp, Porphyromonas bobii
  source 1..38240: mol_type = genomic DNA
tgactggggctaagtcgtaacaaggtagccgtaccggaaggtgcggctggaacacctcctttctggagttctgaaaatgggctttagtatagttagtgtagtatgtacgtaagagatgagttaggtggtttttctgaatgtgcgtactcgcttctgctgtcgatatcttttcttctcacccatcgcgaggcggtgactggctatccagctggtcaccgcctcgcttcgttatatacccttggccaatatgacggcttcacgcgagacacactgcgtgcgtgtcatacgtgagggctgggggagtctctacattatatatagctcctgcgagatgggaggtttggcgcgtagttaatttttattacctttgctccaaagaaactcaagaagagaagtattagatgaagcgtacaacgtacatgatgtccatgatgatgatgatgcagatgatgtctgcgtcgggctcgtcacatctgtacttcgcatagtcgaatctccaagatattacgtaagcccgctgcagtccatgattgcagcgggctgtgcttttatagcgcctccccatttattccccattactattcaccccacaaacaacgacgaagacaatgagcaagaacgtatctaccctggccctccaccacgctttcgatccaactgcaaactgcggctccactgcagtgcccctttatcaggcgaatgccttcgcttttgatagtactgaccacgctgctggggtctttgacctgcagatccctgcctacctctatacccgcctcaataaccccacgaccgatgtccttgagcagcgcctggcagccctcgaaggtggtgtcggtgccatcgctacggcaagtggcatgagcgctatcgctacgacgatcttcaccctgctgcgtgctggtgaccatatcgtagcctcctccagcgtctacggcggtacatacaatctcttgagcgtcacgctgccccgcctcggtatcacgactaccttcgtcgatgcccaagatcctaagaacttcgaggcagctatccagcccaataccaagctcgtctacactgagacgctgggtaaccccaagctcgactttgtcgacatcgccgctgtagctgatattgctcatactcacggcctccccctcgtcgtggacaatacgctgacgcctgtgctctgccgacccatcgatcatggtgctgacatcgtgatctactcgctgacgaagtacttctgcggtaatggcacggcgatgggtggtgcagtgatcgactcgggtaagttcgactggacgaatggtaacttccctgacttcaccgagcccagcccaggctatcacggcctgcgctacagcgagacgtttggccctgctgccttcatcgtccgtgctcgtgtcgaagggctgcgtgacctcggtagctgcctgagtccctcgaatagcttcatcttcatccagggtcttgagacgctctcgcttcgcatccagcacgcttcgaagtcggcacttgagatcgctcgttggctccagagccagcctgaggtcgcttgggtgaactaccctggtctggagtcggatcagcatcataagatctgcgaccgctacctcaagggaggcttcggctgtatcatcaccttcggtctgaaggacggctatgaggctgctaagagcttcgtcgataatacggagatcttccgcatcgtggctaacctcggcgacacgaagtccctcatcattcaccccagcagcacgacgcaccgtcagctctccgaggagcagcagcgctcggcaggtgtcacccccgacttggtgcgcctctccatcggcctcgaaggtatcgaagacctcaaggcagacctggctcaagcactgaagaaggcgacgaagtaagatgctgcacgaagtctctatccccgactttcgctccgagcgaggagagtcttatcccgaggtcgtactgagctatgaggtggctggtccacctcttagctcggcgcctctggtcctcgtatgccacgccttgacgggcaactctaccgtcacaggcgacgagggctggtggaataagctcatcagcgaggagggcgctatctcaccgacgcactacacgatcctctccttcaatatcccaggcaacgcctatgacgggcgcgaagcggacgaccccgaggcctttgagttacgtgatgtcgctcgtctcttcctcctcggtctagaggcactgggagtgaaggaggtctatgccgtcatcggggcttcgatgggtggagcgcttacgtggcagatagcttatctcgccccaacgctggcgaagcatatcttccccatcgcttgcgactatcgtgcttcggactggctacttacgcagacgcttatccagaagcagatcctcgcgcactcctcgcacccgctggaggatgcacgcatccatgcgatgtcgtgctaccgcacgcctcagtcgctcaatgtgcgcttcgctgctcagcgtgatagtcggggtacaggctcagggcagtacgacgtcgagagttggctcctctaccatggtgatgccttggcacgccgcttcaagctctcggcctaccatgtgatgacgcacctgacctcgactatcggggtctgcgaggaggtagaggcgcttgcatgcatccgttcggccatccatctggtctccatcgatagtgacctcctcttcacccatgaccgtgccgaagcgacctatgaggcactgcgtgcgctgggtgcggacgtgagtctcgctgtcatccactcgatccatgggcacgatgccttcctcatggagtacgagcagctcaatcatatcatccgaccttactttcctactcacgcatgaagatcttgaagttcggggggaagtccctggataatggtagcggcatcttgacggtgctggatatcatcatcgataactatcgcgctggcgaagctcccgtcgtcgtggtctcagcgcgcggtaagagcactaatgccctgctcgctctcgcggagcaggcttgcgctggtgagccctacgaagcagccctccaagccttctgggaacatcagtgtcaggataccacgcttcgcttcgaggcagagcgtgtgcagctggagcgcctcctctcggggatctcgctcttgggcgaatgctctcctcgtactgcggatgaactcgtgagctatggcgaagtcctctcgtcgcagtatgtcgctcaggcgctcaaggaccgtggctacgaagccgtggcgattgactcgggtgacttcctcgtgacggatgcccactacggatcggcttcggtctttaccgaggcttcacgggagcgctgtcgtgcgctcttcgctgggcttcccgcaggagtgatacctatcgtcacgggcttcatcgctcgtgatgaggctgggcgtcgcacgacgcttgggcgcaatgggagcaactacagcgcagcgctcttggcgaacttcctcgaggcttcgctgatggagaactacacgcatgtcgatggcatctatacggccaaccccagtgtcgtagccgaagcacgtaagatcgacgaactctcctatgccgacgcggcggagctatcgcagttcggcgcagagatcctccatatcaagacgattgagccgctgcaggagcggggtatcccactgcgtgtgctcaataccttcagttatggtgaggagtcgaatgggacactcgtcacggcccatccacgggataaggtcgtgcgtgcgctggcttcgctctcgggtaaggcgctcatccacttcgaggggcgcaatatgcttgggcgctcggggattgatgcacgcatcttccgctcgttcgaggccgcagaggtgagtgtcagcctcatcgctcagggttctacggagcgtggtacggcgattgtcgtcgacgaggaggaggccgaccgcgcagtggaagccctcgtgcaggagttccaccacgacctcgagactggtcatgtgactaagatctatgcggagaaggggctggcagtggtcgccatcatcgggctgaacttattggagttcgaccgcccctatcgtgctcttgtccgcaaccgcatcctgcctatcctcctcagcaactcggtgccggagaataccctctgcctcctggtgcgtgatgatgaagagcgtgagaaggcgctgaaggtcatccacggcgagctctttgagcgtcccaagcgcattcatctggcggtcatcggtcacggtacggtcggtggtgctttcatcgggcagattatccagcagcgtgagctcctcatcgcacagaagaatatcgacctacgcatcttcgctatcgcagactcacgccatcttctgcttagtccttcgggtgtggaggcagattgggcgaccgagctggagcgtgctcccttctcgggtgaccttgccgaagcaatcatcagctacggacagcgtcaggcgctggagaatatgatcctcgtggacaatacctcgtcccctgtcatcgcttcgcactacgcacgctatgcggctgaaggcttcgatatcgtctcctcgaataagaaggcgaacatcgcaccctatgccgactacagctacctgcgggatacgctccagcgtcaccgccgtagctatcgctatgagacgaatgtcggtgcgggcctcccgctgatcgacaacctcaagctcctgcacctctcgggcgaacggatcacacgcattcacgggctcttctcgggaagtctcagctatatcttcaaccgcctcaccgaggagcccgagcgttcgctccgctccatcgtcgaggagtcggcacgtcttggtctcactgagcctgacccgcgcgaggacctcagcggggaggatgtagcgcgcaaggtgctcatcctcgtgcgtgagctggatgtacccgccgaactctcggatgttcgctgggagaatcccgtgcccgaggccttgcgctcgctgagtctggaggacttctgggcgcgctttggtgagctggaggcttccatcgaagcgctacgtgctacggctaagcccgatgaagtactccgctatgtcggggatatcgtctgggatgatgtgcgtcaggaggcgacgctctcggcggggctccgtctcgtctcccgtacgtcgccactggggcgcgtgagtggtgctgatagctgcttcgagatctacacggagagctatggtagccagcccatcgtcatccaaggggccggagccggtgctgccgtcacggcacgtggtgtcttcggcgacgtcttgcgcttggcagagggctacgagagctaatagccccacattcgcccgctctcgatagagggcggtgcagtaccttactatttcttgagggtgcgaaccaatgtaggttcgcaccctcttcctatatgagtacgtgggtagagctatataggatggcgaagaatgctatatagctttgtgaagtaacctctattaggttgttgctctgcgtagggataaaagttgtggaggagtggcagataagtttgggctacgtacgtggtcctaatatctacgtacgtggatatttggactgacgtgcctggtctttaagactacgtacatagacagaggaaaaccactacgagaaggcgcttttctcttcaagagaatggtactttttctctgctggggtgaatgccgtatctttgtgaaccctaattcattatttagcagaagacgatgagcgaacaggaagcctacctcgagcaatatacaagtgaacttcagcccctcttactgcagcttgcacagcaggaggggtttcttcgtggtcccctcttagagacggcagacctcgacgagctgtggcccgcgctggcacagccctatatggccagtgccgtgcccgacttcgagcagtacccgctggtgtcgctcggctggatgaccttcgtcggtatggcgatggccgtgctgtgggatgaagactggcagcgctatcagccactgggtagtgcgctctatacgcagctccgtgatgcacgcggctgggatgagctggacgaatatgtgctcgaggatgtcctcgggatgctacgcggctcggaggaagccaagcgctataccgacttggtgcgtcgcttggcagagctggcgcttacgcagcttcgtcatgagaatgccgagccatcgagtcccatggcattccagctctatgcacgtacgctcttcggtctctatcgcatcggagtagcgctgggcttggcacgcttgggctacaagctgactcaggctaactaagctgggtgggggagtgtgctccccgaaagtcaaagtcactataataaatacagagtatatgaatacgttcgatcgaataagagtttatttcaatctacgccctaatctggatgaggagcaggtgatcatcgaggaggtgacccgtggggtgtccttccgtggagctaatctctggatccttatcgcagcgatcttcatcgcttcgctcggtctcaatgtcaattcgactgctgtcatcatcggtgcgatgctcatctccccgctcatgggacctatcatcgggatggggctcgctgtggggacgaatgaccttgacctgctgaagcgcgcgctgaagaacttcagtatcgctacgcttatcagcgtactcaccgctgcgatttacttcttcatcagtccgctggaggaggcacagtcggagctgctggcacgtactacgccgacgatctatgacgtactcatcgctttcttcggtggtgctgcggggatcatcgccctctcgactcgtggccgcggagggaatgtgatcccaggggtcgctatcgctacggcacttatgcctccgctctgtacggcgggctatggactggcgacggggcagctgaacttcttcttcggggccctctatctcttcttcatcaatacagtcttcatcggcttggcgacagctctcggggtgcgaatgctacgcttccactaccatgagttcatctcccctgagcgagctaagcgcgcccgaaatatcctgatgctcatcgtcatcgcgacgacgatccctgcggtcattatgacgatcaatatcatccgcacgagtatcttcgagaatggacttcgccgcttcatctcctcagagctggaacagcccgggacgcagatcctctcctcagggacagatgctacgacgaaggagctacgcgtcatagccgtagggcgtgcgatcacggaggagaagcagaggtcagcatcggagaatatggagcactatggtctcggtggctatcagctctcagtgattcaggggggagcttcggatagcttgctggcgctcagtagtcagctggcgcagcgcgcctacagtcaggagagcgagcatcagaagctcctcgagctctcggctgataatgcagcgcttacccagcagctcaatgcctatacccgatgcgaggaggtggctgaagctatccgccccgagctggcggtactcttccctgccgtgcgctcgctgagcttagcacgtaccgtcgaggtgcagcgtgacacgactgctacccgtcgcttcgtcacggcggtctttgctgtagacgactcgaagagctggacttcggccgatgccactcgcttccaggagtggctcaagacacgtctctcgggagatagcattgtcctgctccctcgcacgcaggctgctactacggcagctcgccgataaggctatcccttacccgcctctttgcgtagaagaggaagacagtcctcccaagcggtatgcgccgcttgcttgggaggactgctgtatatgggtgagctatccgctcgttgggcggtcttttgtacctttgccctaccatctaacattattcatccaaactactgtagtagctatgaaattacaaactctacgtgcttggggccgtcgggcgctggtcgctcttctcttaggctccgctactcctcttgtcgcacagcagtatttccccaatggagatccctctacgcccgacgaacacggtgcgcgctgggtcttcggtgggctcgtctccttctggcaagacaataaggccaagactacgacattcgacttctcccctgaggttggctacctcttcaatgagaattggggcctcggtgtcgtcgggacctaccagtatcagaaggggaatggtgaaagcgagagtctctgggcactacgcccctttgctcgctactactatatgcaccgcgggcctttcaacctctatcttgatggtggcttcggcttctctacctctggcggtgtgaagggctgggaagtcggtctgcgccctggtgcgtgtgtcgacctgaccaagggcctgtgcctgtgcctgcgtcttggctttatcggctatcgtgataagttcggtgctggtgaagaagccggcctctcttcctcgggcttcggcttgcgcttcgctcccgaggagctgcagatcggtctcgagctggagctgtaattatactcctccctcattgagtacagcgcgccccagtgctgataggtaagtcctgtcacactggggcgcgctgtatctatacgcggggtagaaggggcagatgaagagagtatgccagcctctctgtagtataaatgacacgatgtgtttaggtgagtgtgacaatttggcgtactctcgtggcgtatgctttttggcatagcctttgacataagtagggcgtgagtgtgagttgttagactcctcataggtgtcgccccttgaccaagtgcctccctcagtgaggcagtcggcaggcgggcaccctacgacggaggacgcagctgaagctcgaaaagtagaacaataacagaaacaagataaaagacaaaagaatattatgggaaagattattggaattgacctcgggactacaaactcttgtgtctccgtactcgaagggaacgaacctatcgtcatcgctaacagcgagggtaagcgcacgactccctctgtcgtcgccttcatcgatggtggcgaacgtaaggtaggtgaccccgcaaagcgtcaggctatcacgaaccccacgaagacgatctactcgatcaagcgcttcatgggtgagaccttcgaacaagtgaaggacgaaatcgcccgcgtaccttataaggtcgtgcgtggtgataacgacacgcctcgtgtcgacatcgacggccgtctctacacgcctcaggaaatctctgctatcatcctgcagaagatgaagaagacggctgaggactacctcggtgcagaggtcacggatgcagtcatcaccgtacctgcttacttcaacgacgctcagcgtcaggctacgaaggaagctggtgagatcgctggtctgaacgtccgtcgtatcgtcaacgaacctacggcagcttcgctcgcctatggtcttgacaagagcgaccgcgatatgaagatcgctgtcttcgacctcggtggtggtacgttcgatatctcgatcctcgagctcggtgatggtgtcttcgaagtacgctctaccaatggtgatacgcacctcggtggtgatgacttcgaccacgtgatcatcgactggctcgccgaagagttcaaggctgatgaaggtgtagacctccgtcaggatcctatggctatgcagcgtctgaaggaagctgctgagaaggctaagatcgagctctccagcacgacctctacggagatcaacctcccctacatcatgcccgtaggcggtgtgcccaagcacctggtgcgtacgctgactcgcgcaaagttcgagcagctggctgaccgcctcatccaggcttgtgtcgctccttgcgaaacggctctgcgtgacgctggcctctctaagagcgatattgacgaagttatcctcgtaggtggctctacgcgtatccctgctatccaggagatcgtagagaagatcttcggtaaggctccttctaagggcgttaaccctgacgaagtcgtcgctgtcggtgccgctatccagggcggtgtcctgacgggtgagatcaaggatgtccttcttctcgacgtcacgcctctctctctcggtatcgagacgatgggtggtgtcatgacgcgcctcatcgatgccaatacgacgatccccacgaagaagagcgagatcttcacgacggctgtcgacaaccagcccgaggtagagatccacgtcctgcaaggtgagcgttcactggctaaggacaacaagagcatcggtaagttcaagctcgaggtagctcccgcccctcgtcagacgcctcagatcgaagtgaccttcgatatcgacgctaacggtatcctcaacgtcacggctctcgataaggctacgggcaagcagcagaagatccgtatcgaagcttccagcggtctctctgacgctgagatccagcgtatgaaggacgaagctgctgctaacgctgaagctgacaagaaggagaccgagcgtatcacgaagctgaaccaggctgatagcctcatcttccagacggaaaagcagctgaaggaattcggtgataagctctccgctgacaagaaggctgctgtcgaagctgcccttgctaagctcaaggaagctcactcggctcagaatatcgaaggtatcgacgctgcttctgctgaggtacaggctgccttccaggctgcaagcgaagagatgtacagccacgctaacgctgctggtgctgctgatcctgccgctggtgcctcctcctctcagcctgctggtgacaacatcaccgatgctgacttcgaagaagtgaagtaagactctcttactcccgtcgctgacgggtgaaacggataaaggcgaagacgccactgtcctcccccttgtgggatgggcagtggcgtcttcttttctactgccctcgtggagaggcaaaacgaaccagtactggtcgacgcagcgaccagtactggtcacatatagttaccagtactgatccgaagcgtgaccagtactacttccctcggtgaccagtactggtcacttttgcgccctcgtagatgcttgcaccagaggtctatatgcgggcgtcggttttcgctggggatgggctgatgcgcttcttcgggtgaggtaacctccctcgtcggctgatgagtaggtgtataaggctcggatcccttgtggcgatgcgggtcgtttgctcaaaaagtagtatcttagagccttggtagtaggtgccttttggccgttactatcaaggctaaacttacttttcaaaataagaatgctggatcgagaagacagaattatagacatcaacatcgaggatgagatgaagactgcctacatagactactctatgtcggtcatcgtctcacgtgctctacccgatgtgcgtgatggcttcaagcccgtccaccgtcgtgtactctatgcgatgaacgaggatgggaatacctatgataagcccacccgtaagtgcgccagcgctgtcgggcaggtcatgaagtactaccacccacacggggactcctctatctatgggacgcttgtacgtcttgcccagccttggaacctccgctatcctctcgtccaggggcaggggaacttcgggtcgatcgacggggactctcccgctgcgatgcgttacaccgagtctcgcctgaaccgcctggccagcgagatgatccgagatatcgacaaggatacggtagacttccagaataatttcgacgactctactgtcgagcccaccgtcctccccgctcgcttccctaacctgctggtcaatgggtcagctggtatcgccgtcgggatggctacgaatatggcaccgcacaacctctccgagtctatcgatgcctgtgtggcatacatcgaccacaagggggatatcgatgccgctgggctgatcaactatatcaaggctcccgacttccccacgggcgggatcatctacggctatgccggggtgcgtgaagccttcgagaccggtcgtggccgtgtcgtcatccgcagccgctgcgagatcgaggagcacaacaaccacgagcgtatcatcgtcaccgagatcccctatcaggtcaataagagcgagctggtcaaggcgatcgctgatctgatcaacgacaagaagatcgacgggatctctggtatcgcagacgaatcaaaccgtaagggtatccgtatcgtcatcgacatcaagcgtgatgcgaactcaggcgtagtgctgaacaagctctacaagatgagtgcactgcagagctctttcagcatcaataatattgcgctggtgaagggccgccctcagctgctgaaccttcgtgacctcattgagctcttcatcgagcaccgtcacgatgtcgtctaccgccgtacgcagtttgagctgcgcaaggccgaggagcgtgtccatatcctcgagggcttgatcatcgctgtcgacaatatcgacgaggtcatccgcatcatccgtgctgccagtgagcctcaggaagctatcgagaagcttatggagcgcttctccctctcgctcattcaggcgcgtgccatcgtggatatgcgtctgcgtgccctcaccggtctggagcgtgagaagctgaaggaagagtacgctgctctgatgcaggagatcgagcgcttgaaggctctcctcgctgacaaggaactgcgtgcacagctcatccgcgaagagctccttgagatcaaggagaagtatggtgacgagcgccgcagcgagatcatctacacggctgaggaattcaaccccgaagacttctacgctgatgacgatatggtcatcacgatctcccaccacggttatatcaagcgtactccgctctccgaattccgctcacaggctcgtggcggtgtcggtgctaagggtagtgatacgcgcgacgaagacttcatcgagtacatctactcggcttcgatgcacgagacgatgctgctcttcacccagatgggccgctgctactggctcaaggtctatgagatccccgagggcgctaagaacgctaagggccgtgccctgcagaacctcctcaacatcgaggcaggcgaccgcgtcaatgccttcatccgcgtgaagaacctgacgcgtgatactgagttcgtgaactcgcattacctcatcttctgcaccaagcgcggtacgatcaagaagaccctcctcgaggcgtactctcgtcctcgtgccaacggggtcatcgccatcaacctcgtcgacgatgaccagctggtcggtgtcggcctgaccgatggcaatagcgaagtcctcatcgcgaaccgtaacggtcgcgctgtccgcttcaacgaatctactgtccgcgctatgggccgaaatgccacgggtgtacgcggtatgacgctcgatgctgacggccgtgatgaggtcatcggtatgatcaccgtacctcaggataccgaggagaccatcctcgtgataagcgaaaagggctatggtaagcgttctcttgtagaggactaccgtatcacgaatcgtggcacgaagggtgtcaagaccctcaacatcaccgataagacgggtgagctcgtagctatccgtcccgtcaccgatgagcacgacctgatgatcatcaataagagtggtatcacgatccgtgtccacgctcgtgatatctccgtccagggtcgtgctacgcagggcgtgcgcatcatcgatctgaagaagcgtggcgatgagatcgcttccgtctgccaggtcctcaccgaggaagactccgacgaggaggcttttgatgcagagtctctccccgaaaacgaatccgcaactccaatcagagaagaagagggcaccaagagcgagctcccacaagagctcatcgacagagccctcgccgaagacaatcaataacaagacacactaacacctaaatgaagatgaagaaattagtttgtgccatcgccgtaggtctcctgacctccgctggagctttcgctcaggttgctaatgtcaagtctgctgagaagatcgcttcttcagacaagccagacctcgccgaagctcgccgcctcatcaccgaagctctcgctaacgatgagacgaagaatgacccctatacgtggtatgtagctggtctgatcgaaaacaaggcttacaccgaaggcttcaagcaggctgctatcgaccagaacgctgaccgtacggctatgtacacggcgctcaccgcctctgtgccttcttggctcaaggtctatgagctcgaaagccagcccaacgataagggtaaggtcaacctcaagtacacgaagaagctccaggaagtcctgcacaacgactacctccagctcttcaacgggggcgcttggttcctccagagcaacaagtacgctgagggcgtcgacgctctcgagaagttcctcgacgtgaagaaggctcctctcttcgctgaagacaaggatgtcgctgctatcgactccaacgcgatgaacgcagcttactatgctatcggtgctgccagctcgctgaaggactatgaccgcgtcatctccctctacaaccgcttcggttccttcgctctcaaccccaaggatatccatcagtgggttatctctgcttacttcgctaagcaggacactgcaggtgctatccctgtcctcgtcgaagctgtcaaggcttctcctgaagagccttacttcctcgtaaaccttgtcaccgcctaccagaaggctggtaagggcgctgaggctaacaaggtcctcgacgatcgtatcgctgctaatcctaacgatgctacggctctcctcgtcaagggttcgctcgcagaagaaaaggatctcaaggaagctctccagtggtactacaaggctgctaaggctgatgccaacaacgctaacgctgtagtctacctcggtgctggcctctacacggctgctgctaagatctacgagaacacgaatgtcacggctgctatggccaagacggctgatgacctcctccgtgctgcagtacctgttctcgagatcgcttacaagacgcgccctgacaacatcaaggctatgctcagcagcatctactatcagctcaagatgaacgacaagcacgatgctatcgaagctggcacgctcaacgtagatggtgctacgctgcctgacatcacgggtctccttcaggggcttgacctcaccgtcacaaaggctgctcccgctgcagtcgaagagcctgctgcacagcctgctcagaagaccacgacgaagaaggctcctgctaagcgtcgcaagtaatcctccgcggattccttagaatataaaaggttcagcccccacatcctccggtaggatgtgggggctgactttttgtgcttatacactctgtgtatggtagcacttcatttcttgaagccttggcgatccttagcctttctgcctcgagcgggagatggcgaccagccacaccccgctgaagatgagtgctacggcaagggcatgtgtgagcgtgaagactgccagacccagcgtgacgcttactacgacagctaccagcggctgcatatagttgtacatgctcactactgttgggcggagtgtgcgctgcccattgatcatcagtaggtagctgacaaaggtaccgaagaagactacgtagccgacctccaggagggtacgcgtcgagagggctgcgacatctgtcttcagggcttcgctcgccgtgaaggggagtagaaggagggtagcccagaggaacatccacttattcactgtgaagacggagtacttcttcgcgagcttcccgaagatcgtgaggtagagggcataggatacttgcccagcgacgcagagtaggtcaccgcgtatatcacccagctggagcgaggagcccgaggcttgcatgctggtccagatgagtaggagcgcgccgcagcagccgagagctacacccagtgccttcttgcgggtgatgggctccttgaggatcagtgccgagaggatgagggcaaagatcggcatcgtcgtagtcacgataccggcattcactgggctggtgaggctgagtccaatggtgaagcagcactgattgcatacgagtccgaagacagctgcgccgacgaagagaagcttatcccgcttcgctacgtgctcccgtggggcaaagagtgaggcgatccagaagaggatagctccgcctaatactcggcaggagacgagggtgataccgctgataccatgtaggagagcatcctttccgagtggagccataagcccccagcacacggcagctcccaggaggctaaggtgggctgccagaggatgctgtttcgttgtattcattaatagatgatcgcgaggtactaaaggtaccagatgatgagcatgatgaggaggaggcgcaagagaagggatagaccgagggccagccactccgtacgctgggtgatctgtatggcatgctgcagatcttcgtcgcttagttcgcgcccgacctcaccgatatagggcttgtcgacgacttcgccgaagtagtcgtgaggcccaccgaagcggcagccgaggacgagtgccagtgctgcctcggggtaacctgagttggggctgagatggcgcttgccgtgctggaaggtcttgcgaaggagatctagtcgccctgctgcgatgagcatcagtatagccgttgtacgcgaggggatgaggttcaccagatcatcgagcttggcggagaagaagccataggcacgatagcgctcattgaggtagccgaccatcgagtcttgtgtattgatcatcttataggtgagtatgccaggtgtgccgaagaagctccaggagagcatagggcctacgacgccgtcgctgaggttctcggcgagtgtctccagcgctgctgtgcggatctcctgggcagatagcgcgcctgtgtctctcccgacgatgcgcccgacttgcttacgcccagcctccagcgagacggagagtgcggagaagacccccttcacctccgtgaccagagtcttgcctgagagcatgtagaagatgcagatcgtagagggtagtgcaatggttaggaggaggaagtgcccgaagtagaggtctcccagatagtagttgatcgcagcaccaagcaggaggaaggcaaaggtgaggagcgggaggaagaaggtaaagcagaccaagctcccgttgtagaggaagcccttgagtcggcgtgacgtcccgttattcagatgcttttctccgaagccaatgaggcgaccgaagaacacgatggggtggccaaggcgcatcggatctcccagtacccgatccatcaggaagccgaggacaagaggaagcgtgaagatgaggatggggtagaccatagagatggattacagacgcgataggagagtctcgaggtaggcacgcaagacgagtgggtggcagtgagcttcgtcgtgcgctgcatagacgagggtgatccgctcttcatccttgtgacgagcgaggaattccgcgggcgcagttgagccctccagctcggtacgatagtcacgggcgaactcctcccagcgggctggatcgtgaccaaaccactggcgaagctccgtcgagggagctaagtccttagcccattcgtccagatgcgctcgctctttactgaggccacgaggccagagacgatcaacgagtacgcgatagccgtcggtggcttcggcaggttcataggctcgtttgagtagtagttccatagggatgtctctttatctcttgtctaagaagtcgtgaggataggtgtagcgaatattgccgtcgtcatcgatgagaagcagagagagctcgctcttggggacgagcttcgcagctgcttcgtagcaggcgtcgaggacgcggagcatgaagcgctcgaggtcgtccggggcgagtcccgtccacagctcacgagccagcgtcaggccgtcgatgagggtatgagtggcttcgctacagccagcatcattagccatctggtgcatgaagtccttgttcatgacgaccttgcggctatgcgtgtcgaggttgccttcggcgagcttgaccgccttgccgagcatgatccccatatagatcttggggatggagaggagggcgagcttctcgagggtctctccgatgaagttgccgtactgcacgaaggactggaagggtagctcggggaaggcactcttgaggtacttctcactcttggctcccgagttgatgacgatggtatctgctccgagagctacggcgacatcggcttggcgaacgatggaggccacgaaggcttctgacgagaagggcttgacgacgcccgaggtgccgacgacggagatcccgtccttgataccgagacgggggttgaaggtcttcggggcaagctctcttcctgcagggatactgacggtgatatcgacacctccggtagggtagtgacgacggacgatcgtctccatcatcgcgcgtggtgtcttattgatcgcaggccctccgatctccagtcccagcccagggagcgtgacgacgccgacgccctcgccctggaggaagcggatgccctcatgctccgtggtgaggacgacctcggagcagatctcggtgaggtgcgtgacatcggggtcatcgcccgagtacttgcgtgccatggccttgtagcccagctcggtcttctccacacgctctacggggagcttcacctcttcgcccgagggaaggaggatagcagcctctgtcagcacctccccctcgtggaggagggcatgcagggctgcagctgtcgctgccgtcgcagtgcttcctgtggtgaagcccgtcttcagcgggaagaagtcggggcaaaggcgctcgatagccttacgcaggcctacgggaccgtagacgtactcgtagtgctcggggagtgcagggcgggtgatcatgtagacgggtacaccagcggcgagggctggagcgatcttctcctcgaagaagccactctcgccactctccttcgtgatcacagcgtcgggctgtatctcgtcgaagagcgcctgatcttcgccctcatggaagtaacgtatatggctgaaggggaaccccgcagccttggccttctccttcgagtcatctcgatcgaggatacggaagaagctctcatgcttctcccagaagggcttgagtggggcgatggtattcacgcccgtcagagcaagaagtctgtgacagggctgtgcctccagcttcttgatcatctcctcgtagctcgcgcattcgatgaccttcccggtgcgctcgctgtacttgcgctcgtagcggaggacggggatgccgagctcggctgtcacctctccgatggtcttgtggaggacggcggcgaagggatgggcggcgtcgacgacgaggtggatatccttctcgcggatgaagtcacgcatgacctcgtgtgtcatggcgcccgagacacgctcgccgtggacgaggtctacctcttggaaggcccccttggtggagtaatagtattctttgccggactcgtcgaggacggagctgacgatgcggccctcggtcgtacctccgaagattaggatcataagtttggcttggggtagtggttagcttaggcgactgcgaagctcggtatagagctcttcgatagagcggcctaagaggggatgaataaactctggagcgatctcacaaaggggctccagcacgaatagtcgctctgtgaggagcggatgggggagggtcaagcgctcactctcgaggatgagatcgtcatagaagagtagatcgatatctatggggcgatcgtggtagtgccctgccacgctcttgcgctgacgaccgagctgccgctcgatctcttgggtgcggtcgagtacctccagtggggagagcgacgtggtgagtacgagcgcggtattgaggaaggggtggggactctcaaagccccacggctccgtctcgatgaatgtagcgatgccaccgaccgtcccgatgaggcggtcgatggcatctatggcttgatgtaggagtgcttcacgatcaccctcgttgctaccgagagagaggtacagctgaggcatgaggcgcttccgtcagattagtcgatgatgagcatagcgtcaccgtaggcaccgaagcggtacttctccttgatagcgatggagtaggcgcgcatagtctcttcgtagcccccgaaggctgcggtcatcatcagcaggatggacttcgacatgtggaagttcgtcaccagagcattggggacgttgaagtcgtagggggggaagatgaacttgctcgtccagccgtcgaaagccttgaggtgacgctgtgtacccgatgccgtctccatagcgcggagtacggaggtgccgacggcacagatgttctgccctgcagcgctggcagcattgacgatggtgcaggcttcctctgggatgatcatctgctcgctctccatcttgtacttggtgaggtcctcgacgtcgatctcgcggtagttgccctgcccgttgtgcacggtgatgaaagccttgcggatatccttgatctccatacgcaggaggagctcacggctgaagtggaagctggcagcaggccctacgacagcgccttcgttcttcgcgaagagtgactgatagcgctgggcatcttcactgttggggctgcggttcatatacttgggcagaggcgtctcacccatggcgtgcagcagctcacggaactcctcttgcgagccgtcgaagaggaagcgcagcgtacgaccacgtgaggtggtgttgtcgatgacttcggctaccagctcatcgttcttcccgaagtagagcttattgccgatacggatcttacgagcggggtcgacgacgacgtcccagagcttgaaggcggggttgagttcgcgcaggaggaagacctcgatctgagcaccagtcttctccttgttgccatacatacgggcggggaagaccttcgtatcgttgaagacgaagacgtcatccttgctgaagtagtccaggatgtccttgaagtggcgatgctcgatctcacccgtggagcggtgcagtaccatcaggcgtgactcgtcgcggaaggtggtgggcttcttagcgatgagcgtttcggggatctcgatctcgaagtgacttagcttagtatccttcattgtctatctcgtaggggctatgggttggagggttctgtttcttctgtggggagggcgacgtactcacggaggaaggcttggatatcctcgacgcggtagcagtcctcgatgcggtagtctccgacacgggtgcggcggaggtcggtgaggtggccacccgagccgagggccatgccgatgtcgcgagccagtgcgcggatgtaggtgcccttgctgcagaccacacggatctggatctgggggagggcgtagtcgagcagctcgatctcgtcgatgacgagggtcttagccttgagctcgaagtcccttcccttgcgggctaagtcgtaggcacggcggccatcgaccttgaccgctgagaaggcgggaggcacctgctcgatggtgccgatgaagcccttgagggcctcttcgacggcctcgcgggtgatatgctctgtggggaagaaggcatcaggctccgtctccatgtcgaaggtcggagtcgtctgcccgaggcggatgtctgcgatatactccttgcgcccagcctgcagctcgtcgatacgcttggtatgcttgccggtgcagaggatcatcacgccggtggcgagcgggtcgagtgtaccagcgtgccctaccttgagcttcttgataccgaggtagcggcaggcttcgcagcggaacttattgaccaggctgaaggagctccatgtcagaggcttgtcgagggcaatcgttgcccccgcgatgaggtccagcttctccatctattatccgagggagatgttggccccgaggagcagtgcgatagctataccgaccgataggatgatgcggtagtagccgaaggcgcggaagccgtacttggtgacgaagctgatgaagaacttgatcgccagcagtgccacaaggaaggctacgacattcccgatgaggagcgtctgccagttctcttcgaagacacctatgcccagctccttgtatagcttgtagcccttaagtagggtagcgccgaacatcgtggggacagcgaggaagaaggaaaactcagctgcctgacgacgcgtcaagccctgctgcatccccccgaagatcgtagccatcgagcgtgagacgccaggcaccatcgccaggcactggaagagcccgatgatgaaggcattctgtgtcgtcaccttgcgctcggtcttgcccgtgaagatgcggtcaaagtagatcatcaagatccccccgaggaagagcatcgtgagcacgacccaggtattgccgaggaggtcatcgatagtgtcgttgaagagggcaccgaggatggcagctgggatacaaccgatgatcatcagaccatagagacgccagccaccgaggctcgtcgtcgggtcgggcttcagcccaaagatggggaagggaaggaagcgacggaagtagtagacgacgaccgagaggatcgcgccaaactggatcatcaccgtgaaggccttcagataagccgtgctctccataccgaggataccctcggtgaggatcatgtgccctgtggaggagacggggaggaactccgtgagcccctcgacgagggccaggatgatgctctgtaagatggtcattagtcttcctcctccgctttcttctctatggggcgatcggcgggcttcactagaatggcgtagaccatgaggcagaagccgatgaggcagacgatgggagccacgacgatgcggcggctactgaagatctcggggctgaaggccgtagggtcttcgctctgcccgccggacatcaggatgaagcctacgaggatgaagagcgcagagagcgccatcaggagataattcttcttgctgtacagcatgctttatactatatcgtatagggatgatagggatcggggaggtttagatcaagtggatcttaccctcttccatgtggatgtagcggcgggtcgcacgccacgaggagacgaagctgacacataccccgactaaggggatagcgatgatgaccccgaggaggggtacgctggggcagaggctgaggaggcggtagccgaaggcctgctcagcaccatagaggagtccacccaggagggcaagtgctagcagcgcaccgatgaagccctcgaggatagcacgacggatgaagggacggccgatgaagcctgccgtagcaccgatgagcgagagcgtgcggatacgcatgcgctgcgagtagatgaccagccctgtagcggtcgtgatctgcaggaagctcaccagcaggttgatgccgaggaagacccagaggacgaagcggatggtctggagattgtttgacgcagaggtccactggctctgctgctcctcaagaccctcagcgttcttcagcacgggattagtggcgatgattttcttgaggctatcgggctcggtgtactcactcttgagatagaccttagccatgggctgcaggggattgtagccgaggatcttcgtggggtcttcgccgaggacatccgtgaggctcttagctgcgctgtcggcggagatcagctcgacggagcggacgtagggcagggcgcgaagctcactgagcgtcgcctcagtgttagcgcctggctcatcggatagctctacggagaaggatatacgttcgcgtacctccttgctcagtccctgctccaggacatagacgagaccgagagccccgagcataaagagggtgaaggtgatgcttaggaagctgaggagccgtgcatagcgcagggtcgaggactgtttagctttgggcgcgcccatatatattataggtatgtattctctatcgatgagctgtcgggcgcaccctttacgtatggacacaccacgtacaatttgcatgcaaagatagatattctcagcataaggctttgccttgcggagaaaaagctgtgtccgaggcgagataaacttgccttctcccagagtaaaagccacggagtcgtagtggaaatccttgatctacgtgcatagtccatagatctacgtacgtagtctataggatttgcgtgcatagattttaaatccacgtgcggagacgaaggtatcaccatagtacttcgcacagaattgctcgcacggatggaggaagtactgtgcgggtttgctgggtatttctctactcctctcagtgcgtaggcattgtaagctgtgaactgtgtcgcggcgggcgtaaacggcgatattcactatctttgcaccttacagatattatatacatagcataagtattgacaacgatgaataagatgaataagacctccctcccttccccctgctacatcctcgaggaagacctgcttcggcggaaccttaccctcatccgcgacgtagctcagcgggcgggcgtggagatcatcttggctttcaaggcctatgcgctctggaagaccttcccgattatccgcgagtacgtccctcatagcacggcaagctctatctacgaagcccagctggcctacgaggagatgggcgctaaggcacataccttcagtccagcctacactcgtgaggagttccccaccatccttcgctacagctcgcacgtgaccttcaattcgctgagtcagatcgagcagatgcgccctctgatgccgaccgatgggagcgtgtccttcgggctgcgtgtcaaccccgagtactcggcggtggagaccgacctgtataacccctgtgctccaggctcccgcttcggtgtgcctgctgcggagctccccgagcttcccgagggtattgagggcttccacttccactcgctctgcgaggggacggcggaggatctggagaagacgctacagatcatcgagaagaacttcggacacttcctccctcgcctcaagtggctcaatatgggcggtggccatctgatgacccgtcgtgactacgatgtcgagcatctggtcagcgtactgcgcgccttcggtgagcgccacaccaatctgcacctcatcctcgagccaggtagtgcctttggctggcagacgggttacctcacctcctcggtggtggatgtcgtggagcaccatgggatccgcacggcgatcgtcgatgtgtccttcacctgccatatgcctgactgcctcgagatgccctacaagcccgctatccgtggcgctcgcacgatggacgaatatcgccccgaggcgcacagctaccgtatcggcggtaatagctgcctgagtggtgacttcatcggctactgggagttcgacaagcccctcgaggtcggtgatgaagtgatctttgaggatatgcttcactacacgacggtgaagacgacgatgttcaacggcatctcccatcccagcatcgccctgcgtcgctgtgacggcacgatcgagacgctgcgtgagtacacgtatcaagactataagagccgcatggactaagtccgtatgcggtactaagaaaccacatagagaatcatgggactattcggactcttctctaagaagaaaaaagagacgcttgacgaagggctctctaagactaaggagaatgtcttctccaagctcgcacgtgctgtcgctgggcgtagcaccgtcgatgactccgtgctcgatgagctggaggacgtcctcgtgaccagcgacgtcggcgtagagacgaccctgaagatcatccgccgtatcgaggagcgtgtggcacgtgacaagtatgtctccacctcggagcttacgggtatcctgcgtagcgagatcgcttcgctactcacggagaatggctctaccgacggcgagagcttcgccctgcccgcaggtaagaagccctatgtcatcatggtcgtcggggtcaatggcgtggggaagaccacgaccatcggtaagctcgcctatcagttcaagcaacagggctactcggtgatgctcggtgcaggggataccttccgtgccgcggctatcgagcagcttgatatctgggctaagcgcgtcgatgtacccatcatccgccagcatatgtcggctgaccctgcttcggtcgccttcgatacgctgagcgccgcagtgaaggctggtacggatgtcgtgatcatcgacaccgcaggccgtctgcacaacaaggttgggctgatgaacgagctgacgaagatccgtcgtgtgatgcagaaggtcgtacctgatgctcccgatgaagtgctcctcgtactcgacggctcgacggggcagaacgccttcgagcaggccaagcagttcaccgctgctaccgaggtcaatgcgctggcgatcaccaagctcgatggcacggccaagggcggtgtggtcatcggtatctctgaccagtttaagatccccgtgaagtatatcgggctgggggaaggtatagaagacctccagctcttcagaaagaaagaatttgttgactccctattcggagaatgagaaagaaccaagtagatgtaattaccctggggtgctccaagaatcttgtcgactctgagcagctcatccgccagttcctggcaaacggctatgtcgtgcaccacaactccggtgccgtcaatggcgagatcgtcgtactcaacacctgtggcttcatcggtgatgcgcaggaggagtctatcaatatgatcttgaagatggtcgaggccaagaagacgggccgtatcgggcaggtctatgtcatgggctgtctgacggagcgcttcatggatgagctcaaggccgagatccccgaggtggacggctactatgggaagttcaactggaagaacctcctgacggacttaggtaaggcttaccacaatgatccgcttgggggcaatcgtagtatcacgacgcccgcgcactacgcttatatgaagatctccgagggctgcaatcgcagctgctcgtactgcgccatccccatcatcacggggaagcacaagtcccgtccaatggaggacctcgtcacagaggcccagtcactcgtggcttcgggtgtcaaggagatccagctcatcgcccaggacttgaccttctatggactcgatatctataagaagaatagccttgccgagctcctacagcgtctctccgacgtgcagggactggagtggcttcgcctgcactatgcctatcccgcggacttcccccgtgagatcctctctgtgatgcgtgagcgcgagaatatctgcaactaccttgatatcgccctccagcatatcagcgacccgatgctccgtgctatgcgtcgccgtgtgacgaaggccgagacctatgatctcctgcgctatatgcgtgaggaagtgccagggatccacctgcgtacgacccttatgacgggtcacccaggggagacagagcaggacttcgaggagctcctgcagttcgtccgtgatatccgcttcgatcgtatgggtgccttcgtctactcgcatgagatggggacctatgcccacgagacctacgctgatgatatccctcttgaggtgaagcaggagcgtatggaccgcctgatgtcgactcaggaagagatcgcagcagagctgaatgtggcgaagatcggccgcaccttcaagacgcttatcgaccgcaatgaagaagagtacttcgtcggtcgtaccgaatatgattcacccgaggtagaccaagaggtcctgatctcgaagcaggatgctcccaacctccaggtggggaacttctaccctgtgaagatcacctcggcagatacctttgacctatacggccagctggcccagtaagagatgctacaggaggaactttggtacgtacgcctcgcggagctctccgctgtgcagctggagacttcgcagcagctctggcgcgccctctgccagcagatagagcagcgcctcttgtcggggctgtcgctgaccttccccgagatcggggagtggaagcttgaggagcatagagagtatgtcgcccgtacagcagacggtaagcagtggctcatcccaccacgcttgacgcttgggctacgtcccgtagaagatcgtggcgtgaccagcctctccatcgacctcctacgtgatgccctcgcagaggctacctatgtgtcggccgagcaggtcgctacgtggctccgcgctatccccacgctctggcgagcgctctatgatgagggcattcagatcgtctgggctggcctcgggagctttacgccgatcacgtcggagtcgggcgagcggagtggctatcgcttcctcccatccgaggcgctctgtgctgcgctgaataagcccttcagtatgtttgcacccgtagaggtcgccccgtctccttcgagccctgatctggaccttcgtgagattgaccagctggatcagctgacgaaggtcgagcctattgaggtgctctttgctcctcgtgagactattcaggaggaggtagttacacctcccgtagtagaggaggtggtagagcctgtggtgacagaagagtcgcagcagcccgagtcaccagcagttgtcgtcgaggaagaaatcctcccagctcccgcagacgaagcgcctatcgaagctcctcagcccgctccctctaccgctgtgacggcgcccgtagaggaagatcccttcgttgaccaagaggctcatccccgtatgctggtatgggtattcgtagcgctgggtatagcgatggctttctgtctcttcatctatctcctctctatacagcccgagctggagatgaaggacaaggcttcagctgcagtggaggctgtccagcctagtccagctccagtcgtgccagctgtacccgcacagaccatagacgagactgacaccctacagacgacttctatcgcgactcaagaggaggctacctcatccgtagcaccttctgaagcagtcgtttctaccgcctcttcacaggctgagaccattgagcgtgtgcgccttcgtccaggggatcgcctctcccgcttggcactgaaaaagtatgggaataaggccttctgggtctacatctacgaggagaatagagcccagctcaaggaccccgataatatccctgtaggagcggtcataacgctgcccgcagcctctaagtatgagataaatgcaggcgatacgaattcaatcaaccgggcgttggtactacagcgctctttacatcggtagatgaggcgtatcgtatagcatattttagatagacagataaacgtaatagaaccatatggaatccgtagacatccgcgcactcaccgccgagattgagcgccgtagcctccttattgaatccctgcgtacaggtatgcatcaggcgatcgtggggcagagccacctgatcgactcgctgctcatcggcctcctctctggggggcatatcctcctcgaagggctccctgggctggccaagaccttggcgatcaagacgctctcgcagctcatcagcgctgactacaagcgtatccagttcactccagacctcctgcctgctgacgtcgtgggtaccctaatgtacagccagaagcaagaggacttctccgtgaagaagggacctatcttctctaacttcatcctcgcggacgaaatcaaccgtgccccagctaaggtgcagagcgccctgcttgaggccatgcaggagcatcaggtgactatcggtgatgagaccttcaagctccccaatcccttcctcgtcatggcgacgcagaaccccatcgagcaggagggtacttaccccctccccgaagctcaggtagaccgcttcatgctcaaggtcctgatctcctaccctaagaaggaggaagaggctcagatcatccgccagcagatccgccccgagagccagcagatccgccccgtcgtcagtatcgctgatatcctggagctgcgtcgtctggcagccgaggtctacatcgatgagaagatcgagcgctacatcgtggatatcgtcttcgctacgcgtcagcccgctgactatggactggagaacttcaagtcattcatctccttcggtgcttcaccccgtgcttcgatcaatttggcactggctgcccgctcctatgccctcatgaagggccgtggctacgtcatccccgaggatgtacgtgcggtatgctatgatgtgctgcgccaccgtatcgggctctcctatgaggccgaagcccaggatctgacctctgatgagctcatcaaggagatcctgaatcgtgtcgaggtaccttagtcggcagagagtggtgcttcccctctttgacgaagctccatagccgatgtgtccctataccatatatatatggtggtgtaggggagtgacgaacttagcacgataagcagcataatgaaatccaaacttcagccctccgacctcctacgcaaggtacgccgcatcgagatcaaggcccgtggcctctcggagcaggtctttgcggggcagtaccagtccgccttccgaggacgaggtatggcctttagcgaggtacgtggctatcagataggcgatgacgtgcgtgacctggactggaatgtcacggcacgctatgctcaccccttcgtcaaggtctttgaggaggagcgtgagctgaccgtgatgctcctggtcgatatgacagggagtacggactttggtacccgcgtcgagaccaagcgcgagctcaatgccgagatcgcagcgaccctggccttctccgcaatacagaataatgacaaggtcggtgcgatcttcttcaccgaccaagtcgagctcttcatccctgcaagaagtgggcgcaagcatatcctctatctgatacgtgagctcttgagcttcgagccgcagcgccgtgctacggacctcaatgtgcctctgaagtatctcaatcagctcatcaagcgccgctgtacggccttcctcatctccgacttctatcactggggcgaggactaccgtcagacgctctccctcacagctcgtcgccacgacctcgtggctatccgtacctacgacgaaggggctctggagctcccacgtatggggctccttcgcctctacgatgcggagacggggcaggagcgctgggtcgatacctcttcacgccgagtggctcgtatctatgccgagcgtgtgcgtgagcaggaagagaccttccgtagccattgccttcgctcgggggtcgatcacatcgaggtcgctaccgacggagactatgtgcctgagctgatcaaactatttggacgtagatcctaacccaaccatgcagagactacggtatctatatatcctcgtactggctctcctcgggcttggtggtcaggcagcggcacagcgtgtgtcgatccagacccaccttgaccgctccgagatccgtatcggggagcgtgcggccatcgagatgaccatccgcacggataacctcgctgccacacgcttccaccttgtcgaagactcgacggggacggagcgcttccgcatcttggagttcggcgcactcgatacgatcaatgtcagtgggacgatccaggagatcaaggcgcgaatgatcatcacttcctttgactcgacgctcatcacgatccctccgatcgtagttgagacaccctcggggagtgctgtctccaagccccttgccctcaacgtcatctcacccgaggttgacctcgagcatcccgatcgcttcaagcccatccaagatccgtgggacgaaccctacacgctgtgggatatccttgtgatcatctggacgagctggatcacctacgtggtgatcttcatcgccctcgttcttctcttcatctacgagtataagcgtagagcggagtatatgaaggagcccgagcctgtctaccagcctccgacgactgccttcgagatcttcctgcgccgagtgggtgccctcaagggactgcgcctcgaggatcagcaagacttcaagcactactactccgagcttaccggggcactgcgctcttacctcggagatgtcctgcacttcgatgcgctggagaagacgtccagcgagctgcttgatgaactacaggcctatcctttgagtagcgactaccgtcgcacgatcgagagcctcttcagagaggcggactttgtgaagttcgctaagagcctcccgcttcgtagcgaggctgagcaggtgactcgctctattcaggagcagacaaaggccttccacttagcatggcttgaagagcaggctaagcaagaagccgagagaaaggaggtggccgaatgaccttccttcatcctcagctgctgtggctcttgcttctgctcccagcactcctcatcatctatatcgtatggcgtcggcgtcagcaggcctcgctccgtgtgccttcgcttctcttcatcagcggtgtacgtggcggccttcgtgtctacctgcgtcacgtgctctttgccctgcgtctccttgccttgggcttgatcatcgtggccttggcgcgccctcagagctcctcatcatggagtgaggatcgtgtcgaggggatcgatattatgctcaccatggacatctcgacgagtatgctggcgatggacttccagcccaaccgcgtcgaggctgccaaggaggtggctatgcgcttcatcgccaatcgcccgaatgataatatcggcctcgtcgtcttcgctggtgagagcttcacggcttgtccgctgacgcaagaccatgcgacccttatcaatcgtcttcgggagatgacgacgggtatcatcgctgaccagacggctatcggctcggggcttgccacggctatcagtcgcctcaaggacagcaagaccaagagtaaggtcatcatcctgctgacggatggtgccaacaatacggggaatatctctccgaagatggctgctgatctggcgaagacctttggcatatcgatctatacgatcggcgtaggctcgggagctggtgaggcaccctatcccatacagaccccgctcggtacggtcgtgcgcaatatgcctgtcgaccttgatgagcccacgatgcagcagatagctgatgtctctggcggggcttacttccgtgccacggacaatgagtcgctcgctgcgatctacaagaagatcgatcagctggagaagaccaagctctcgacgcggaactatcatacgacctacgaggagttcttcatcttcgtcctcgccgcagccttcctccttctcttagagtatctcctgcgctcgacgatcctacgcaccaatccgtaagacgatgaatatccatttccattcacccgaatacctctacctactctttgcgctcctgccgctcttggctctatcgctcttcgcctattggcgacgtcgtcagatgctcaagcgctttgccgacaaggagctggggcaggctcttgcacctctggcttcggggaagaagtacgtattacgtgacctcttgctccttatagcgggcgcactcatgatcgtcgtcttggctcgtccacagctggcgggtagtagcgaccaggggacagatgacaagggtatcgaagcgatgatctgccttgatatctcgaactccatgctttgtcaggacgtggctcccagccgactggactttgctaagcgctccatctctcgcctcttagagaatatgcgctcggaccgtgtggggctgatcgtctttgcgggaagcgcctttgtgcagctcccgatcactacggacatcgctacagctcaggacttcctctccgatatttcgcccgatatgctctcggaccaagggacggctattggtcaagctatcatgcttgctcgtcagtccttctccgaccgcaaggatctggggaaagcgatcatcgtcctgacggatggtgaggacttcgaggacaatgccaccgaggctgcgaaggatgcagcgaaggctggtatccatatcaatgtagtaggtattggtaccgacaagggggggcctatccctacatcagaaggtaacctcaccgatgactcggggaatatggtcgtcacccgcttcaatcccgagatgtgtcagcagatcgctgatgctggtgcgggtatcttcgtctcctcaacctcacagtctaccgtcgtcaaggaggtagagaagcagctggaggagctcccacgcgcttcgatctcctcacggtcgggcaatggtgccgcagaggccttcgagccttggctctgggcagcgctggtgctgctcgtcgtcgagttcttcattatgggacgcaagaataagttcctcatccgtcataatatcttcggtcatgagaagtaagattgccatcctctatcttgttctccttgtgctgggcggctcttcgctctatgctcaggggctcaagtcctatatacgccgcgccaataagctctatcaagctaaggactatgcgggagctacgcaggagtaccgccgtgccttgctccgtgacagtctctcaggtaaggcgaacttcggtatatcagcagctgcctacgggcagggacgctatgacgaagctaaggactatctggagcgtgctgcccaagatccgcgtctcacgccacgtcagcaggctggtgtcctgcacaacctcggtaatgtggcgatgcagaagaaggactatcagagtgccgtccagtcctatgaggaagccctgatccgcaatcccgaggacgacaatacgcgctacaaccttgccctggcgcagaagctcctgcagcagcagaacaagaataataagtcgcagagccagcagggccaagatcagaataaggataaggacaaggataagcagaagcaagatcccaagcaggaccagcagaaggatcagaataagcctgaccagaagccccagcaggggaaggataagcagggccagcccaatgagcagcgctccggagagctctcgaaggagcaggctgagcagatcctccgctccttccgcaccgatgacgataagacgcgtcgtcgtgtagagcaggagcagcgtcagcagcagaatagtagtaataagaataagaagagatggtaatctcgatgaagtcagtagccttcgtagggcgcacccttgccctattcctctgcctcctcatcttgccgcttgggcttagggctcaggtggtacgtgtcgaggtgccgcagactgtagtccagggagcatcgttccagctcagctatacttactcaggtagtgaggacttcgagcgtgtcacggagccaaaggtcgcaggcctgcaggtcctctatggccccgctcgccagcagatgagtagcttccagagtgtcaatggacgcaatagctcgacctcctcggtgagcctcacctacacccttatggcagagcgtacggggagcatcacgatcccggctgctacggctaccatcggaggtaagcgtgtcaatgtccatggtgccacggtgcgcgtcctccctcccgataagaatgctccagcaggtcgctctcagtctggtggggctactactacgggtagctacttcttccgcgcgcttcctggggctacagtcgtctatgagaagcaggccttccccatacgctacaagctctatgcgacgacggagtttgatatcaactccttcgaagccccccaatatgatggcttcctctccgagaagcaagccgatgatggccgtcgtcagctccagctcgagacctaccaagggcgtaactatcgtacggtagatatcctcagtgaggtgctcttccctcagcgaagtggtacactcaccatcccctcttctaagatcggtatccgtgtccccgtgcctcaggccagtgacgatcccttctttggctcggcggtacttgctgaccgcacggtggagtcagctccagtgaccatccaggtgcgcccactccccacggaggggcagcccaaggacttctctggtgccgtcggctccttccgcatgcgtgccgagctcctcacgaagagccctaagacgaatgagtcggtgacgattcgcctgacactcgagggtacgggcaacctcaagcaggtcatcagccctgcgatagccttccctcaggactttgaggtctatgatccgaaggagacgtatgaggagaaggtctccgctaccgaggtctatggcaagaagatcatcgaatacttcgccatccctcgtcgtaccggctcggtgacgatccctgcactgaccttctcatacttcgacccgaagctggggcgctatgagacgctccgctcccagaccttctcgctgaatgtggctcaaggcccagagacagcgtcggatgatcgcggtagtctccgccagcaggagcagctcctgcgtcagcttcatgacaccgaaggggtctccgctcctaagggtcttcgctgggcgacgagctggagctatcttctgctcttccccctcatcgcactcctcggcttcatcgcctatctcgtcatcgctcgccagcgtggtctgcgtgctgacagcttgggctacaaggcctcgcgtgccagctcggtggctactaagcgcctgcgcacggctcataagctcctcaaggcaggtaagcgtgatgccttctacgaagaggtgctacgtgcactctggggctatctcggagataagctccgtctgcctgtctcggagctgagtcgtagctcggtctctgagatcctgcgcactcgtgggctggatgaggagacgatcacgcgcctcactcaggtcatcgatgaagttgagttcgcccgctatgctcccgctaaggagggggatatgcaggcgctgtatgatacagctgctgaggtcattggcgctatcgatagtcacaagctttagcccccttactatgcgtacgatatttctttccctactttgcttgatctcgacgctccacctcggggctaccgagaaggcggagatctctgtcgatagtctcttcgcagcggggcgctaccgtgaggcagctgccgctctcgaggcggagatcaagacctctggcgaaagctccacacgctatgccaacctcggtaactgctactatctactgggtgacctcgggcatgcggtgctgagctatgagcgtgctacgctcttggaccctcgtgacaaggcgattgccgaggcgcgtgctgtcctcatcaagaagaccatagataagctccccgatgcggagagctggttcacacttacgggggctaaggtcgcctatgccctgccactcaccgtactcctcccgcttgcccttgtgctctttgctctggctatcggctcttgcgtagcctttgctctggggcgcacacgccgtggtaagcgtatcgccttctatacggcgctggggagcttcgtcctgacggcctttgtcggggcgctgatcctacactgggtgtatgccgagcgctcggctcgagagaaggctgtcatcacgcagcccgaggtaaacgtctactcctcccccagtgggaaggggacggtcaagacccagctgcatgagggtacgcgccttcgtctggtcggtaagtccgtaggcgaataccagcagttctcactgggcgatggtacagatggctggatcgcctcgagtgctattgagcctattgtagctcccaagtaaatactcctatgacgcctcccttcctgccgggcgaggtcgccctactgcgcgctatcaatggagcgcattcgcccttctgggatgcagcgatgttcctcatctccaacgtaggggcgtggaccttccctgcgatagctctcctgatcttcctcttctatcgccgtccgaagagtgaggctgtcctccttctgctgatggtggggctgtgtgtggcgctgggagatgtcctaagctcgacgctggcaaagcccttctttgagcgtctacgtcccacgcatacgccttggctgcaggagagcctgcactatgtctatggctatcacgggaagctctatggcttcttctcgggacactcggcgaactataccgcagtggctaccttcctctgcttgaccttcagagaccgacgcttcacggcggtactctcgctcttagttgcctgggtcgtctacagccgtatgtatatcggagcgcacttcttctctgactgccttgtgggtatccttgtaggccttgccgtgggctatggtgtctaccgtctgtacctctacatccgaggacgagtccttgccacgggttatcgtgccctgcaggagatctatcacgaggggatgcttgcgctggtctgtgcgctctggatctctatccccgtcacgctgatgatggcagtgcaagtcacgcggatcctacgtatggtcggggcttttataatccgcaaaacgaagcgtgcggcacatcgcaaacgaagcgtacacccccacacaccgctgagaagaaacgaagcgtcacattttcggggaatataccaagggcgttcggcaaccatccgaacg

SEQ ID NO: 78 - DNA, 33796 bp, Porphyromonas bobii
  source 1..33796: mol_type = genomic DNA
ctggaaggcccatatccaagagggggaattcgctgaagaggagggagtcgttgatccgttcttcgacttcgtaatcactcaggccgtaccaggtctgaagtagtaggatcttgaacatcatcaaggcatcataggctggatttcctgtggcgttctgggtctttgtatacttcttgttgagtagtgtgcgaatacctcgccagtcaacgcaagcgctgatctgtcggaggaacgagtgcttcatacggtcgcggcgcacctgcgtataaacttgcaggaagctcggagcggattcggtttgtttggtaggcatagctatacgattgttttggttatgaagatactaaatgtcaacggcatacgaaatggttaaaatcctgtacacctttgaaatgccgtgcaatggtctcatttattcagctaaggcatcgcacgccaagcttcccgatatacctctccgaagcgatacacaagcccttcgccttatcgcgagtattcatcttatccagcggaggaaaaagcatcgttctcgtgaagaaaaaagcaccttcacgtagtgggtttcatttatctatgtacgtagtcttaaagaccaggcacgtaaatccaaatatccacgtacgtagattttaagaccacgtacgtagccccaacttatctaccactcgtctgcaacttttatccctacgcagagcaacaactcttagaggtcacttcacaaagctatatagctttcttcgccatcctatatagctctaccatgcacccatatagctatatatggaatcattgcgcaagaccacttcttcattactcgtaccttcttccttcgcaaatcggaggctttaggctgagaagttcgaaggaggaaagtgcaagctgtgaagagatggccttgcgcaatggtctcttctatatgccgatctaacgcgctcccaattcgctctggcgaagtccagctaagcgaagcaagcactgtgcggtctattgcctgcacagtgctcgcttcgctattggcgatcagaggggacgcgtagcttcctgctaaagagctctacgcttgtggctcgataggcaggcactcacacttttgccgtacctttgcacccgtgtggcaccgcattcattcgtacaatattatagggtaaggaagggccccgccacagaccttcggcaccccataccgccccagcctacggggaagacaaactaatcaagactactccattggaatatctattcaccctcgagatgaaggtgcgcgactacgagtgcgacctacagggcgtcgtcaacaacgccaactaccagcactacatggagcatacgcgacatgagttcctcgagagcctgggcgtgaacttcggcaagatgcacgaagatggcctggatgccttcgtcaccaaagtatctatctcctataagaagagcctgcgcagtggcgaccactaccgctcggcactccgctgtgctatgcgtgcgcccaagctcgtcttctatcaggatatcctgcacctcgacgggagcctcgctgcacgcggcgaggtcgagtgcgtcgtcgtcgacaatgggcgcctgacccgtggggagttcttcgctgacctcctccgtgacgtcctgccccaagatgcccagtaaccccccctcctctcccctatccccctcagagtaaagccccacaagcgcactatggcaaagaagatcgcagagaccccgatgatgaagcagtacatggagttcaaggctaagcaccccgatgctatcctgctcttccgtgtcggtgacttctacgagaccttcagcgatgacgccatagccgccgccgagatcctcggcatcacgctcaccaagcgagctaacggctctgcgatgcacgtagagctggcgggcttcccccaccatgccctcgacacctacctaccgaagctcgttcgcgcggggcgtcgtgtggctatctgcgaccagctcgaggatcccaagctgacgaagaagctcgtcaagcgtggcatcacggagctcgtcaccccaggagtcgtactcggcgacaacgtcctcagaagcaaggagaacaactatctggctgccgtatggctctccagcgatggtgccatggggagcgtctccctgctggatatctcgacgggcgaattcatcgtctccgaaggcacccccgagcacctcgagaagctcctcagctcctaccagcccaaggaggtactcgttgagcgcacgagccgtagcctcttcgacaaggtcatcggctatcgaggcttcatcttcgaggtcgaggactggagctttgctgtggagaacaaccgtcgcaagctcaccgcccacttcggtgtgcagagtctcaagggcttaggcctcgagcagcgccccgcctctatcgcagctgctggggctatcctcaattatctcgagctgacgagccaccacgagatcgggcacatcaccacacttcgaagcatcgaccgcctgagctacatgcgtctcgatagcttcaccttccgcagtctggagatcctctctccgatgaaccgcgaggagggcaagagcctcctcgacatcatcgaccacacccagacggctatgggtggacgcctgctccgccactggctttccttccccctcatcgacctcaccgagattcaccgccgccagtcggtcgtgacggatctcgtacgtacggctgacctgcgtcgcacgaccagcgagctcctcatcggtatcggggacctcgagcgtatggcatcgaaggccgtcgtcgggcgtatctcccctcgtgaggtacgccagctggccacctccctcggccaagtcgagcagatcggctcactcctcgcctccagcgactcagctgagctgcagaagatagccagtcgcctgcagcctatgggcgagctcatctccgacatcgagcacacgctgaccgaagagccacccgccgctctcggtcgtggcatcaccatcgccccaggagtgaatagcgagctggacgaactccgttgcctctcctcccacggcaaggaatacctcctggagctccagcgccgcgagagtgagcgcacgggtatcccctcactcaaggtctcctataataatgtcttcggctactacatcgaggtgcgctccacccacaatgataaggtacccgaagactggacacgcaagcagacgctcgccaacgccgagcgctacatcttccccgagctcaaggagtacgaggagaagatcctcggcgccgaagagcgtatcgccagcctcgaagggcgtctctatagcgagcttcttgtacgcctctcgcgcttcgtccgcccactgcagcaggatgcccgcgtcatcgctgagctggactgcctcagttcgctcgccgaagtggccgtcacggagcgctacgcctgccccgtcgtcgatgatggcttcgtcatcgatatccgtgctgggcgccaccccgtcatcgagaagcagctccccttcgggcagagctacgtaccgaatgacgtacacctcgacaacgaagagacgcagattatggtcatcaccgggccgaacatgagcggtaagtccgccctccttcgtcagaccgccctcatcgtgctcttagcgcagatcggctccttcgtccctgccgaagctgcccacctcgggctcaccgatggcatcttcacccgtgtcggagcctcggacaatatctcccgtggcgaatcgaccttcatggtcgagatgcaggaagcctccagcatcctcaacgccctcacgcctcgctccctcgtcctcttcgacgagctgggccgtggcaccagcacctacgatgggatctccatagcttgggccatcatcgagtacctgcacgacaatccccacgggcgccccaagaccctcttcgctacgcactaccacgagctcaatgacctcgagggtcgtctcgagcgcgtgaagaactacaacgtctccgcccgcgagatcgacgggcgtatgctcttccttcgcaagctcgtccgcggggggagcgaacatagcttcggtatccaggttgcgcgcctcggcggtatgccacgtagcatcaccgaccgtgccactgacatcctcggccagctcgagtccgctcacatccacgaagtcacgggcctcagcaccgaggtcaacgtcagccgagccgctacacccagcgtcacagagcccaacagcaatatcacgggtggcgtgcaaatgagcttcttccagcttgacgaccccgtactctccgacatccgcgagcgcctgctgatggtggacatcaacagcctcacgccgctggaagccctgaataagctcagcgagatccagcgcctgctgaagactccttaatgatttttacccgcgcataatccgtactcacaataaaaagtgccttgtcttgagggagtttacctctctaagacaaggcactttctttacatacaaaggggggaagcagtgagatcgtaaaaaataatcggaatatatataccacccacacatagccatacgttgatatagcgagagcaggccacttaggtctgcacctcaagataggatagtattgatcacattgcgtatggacaaaagccctacttgttagagcgaagcagatatcactcacaccacataccttccacttgcgtgaccgctcatagcggtgacctccccccagcttgagcttggcgacacttcccttctatgtctccgagccattgtaagcgaccgaaggtatagcaagtccccctccctccctgattcaagtctctcgcatggtcaagcagctatctgtacaccatgcttccccttcactttttttcggtagctcatcgactacatccctgcgtctccttggaggaacatctctctggatgacgggtagtagagcgcccagtcctctcacatatcccacttaagaatatagagcgggagacgcataatcgtcttccatataccccaatcttattttttcacgatgaaccacttatcagattacctcgcccctaaagctgagttctttgagatcgaggccacagtgagcctcctcatccagttctcaggagacgccgactttgaagatttcgaagaaggagaagctctctaagtcagatccaagcatattgttttaaatatcttacccctacaatgaatcgtatttttcgctcaggactccttcttgctgccctgtctatcgtagcaagctcctgcagtaagaatggtgatgctcctattgatcccaatcaggaggaaccacacgtagaagtgcccatctcagttgctcttgagagtacgctcctcacctatgatgccaagacgctggaagatccacagacctcaggtcgctccctggactgggatccccgcaactctgaggtgacctacaacatccaagactcctccaaggatatcctcggagacgagggtcaggcctctggcaacaagagcaagatcgctaagtacaacaagacgctcaccatcgccaaccaccccacccgtgatctcttgatgatctacaaggtggaagctacgggcaagcaagcacagttcacctacgagaaggctacatggagctacaacacgagaaagcaagcctatgagctgatcgcctcgttcgacatcaatctccccttaggcatcagcgaggaggatatcaagaataatcaggctaagctctccgtactcatcgtcgctgggggggatagcttcgatccccaaaccaagcatctgaaggtagtaggcatctccaaggcagctacgactgacgtcacgaagacgcgtcaggccgtcggacctggtggcatcgctaacgaagtagaccttcctgtcccctacgcttctggctggatcaccttgacctacaaccgtacggaaaattcgcagcgcgtcttccgccccagtggtgtcatcgcactcaagcctcagggtgtcctactgacgaccacgatccgtaataacagtgagcaggacatacagtacagcggattcaccctccgctcaaatgccctgcagtttgacggtgagatcgacctctcccaggcctccctccgccgctctgacggcatgacgccatcgggcttcagcgtccaagactacttcgtcaacacggggaataagtggatctccaacgctatgtgtagccgcgactacacccccttctacgagaagacctttacctacgacggcgaccgcctctgtaaaaagggcggtgcactctccgaagacgtcatcgtgacatgggctatgcccgtcaaggggatcgagacggcgactgactatactcagtccgtcgggaacacctatcgtcctgctataggctatgcccagacgcacatctacgccaatggggtaaagtccactactggcgcagaaatcacagctcccaactacaccatcgctcctgtcatgggtactgacaaggcgcttaagctcggcaaggcttacacgatcaatgctgagttctacacgcagcccaagcagactctaggctacctgctcaaggaatacctcggagctaatcccgacacggagtgggtcgctgacaactcgaagaacctggacatccccctcgtatcgaataagcgaatcacgcagtacggtctccaaaatgggcgcagtaccgataagggcttcgtgaaggtcctcacacagccctggatggagctactgagcctctactctccgatggagttccttgacaacacgaataacgatcgcttcgcccatgaccccaagaatcaggtaggtcgctatcgtgtgcgtgaagtcgagctcccctacgcaaagaccaatgcagagcctacgaccttcggctaccgcaacttcgtcacgactgatgctatcgactggtgcaatacggaccagggtgaaggcctctcctacgcctaccgcttggcctaccgcgaacccaactccttcggcaactctaagcgtagcccctaccagtgcctcatgcgcttcacggcacgccccaacaagggccccatcggatcagacactcagaacaatcgctacatcaagtacatcgatatcgagtccgtctatctcgggaagtacttcgtcgggaacctctacgacacgcctatccccacgggcaagtacgacggaagcaacgagctcctccgtgcagctgtcgatacagagctctgggacggcacgaagtatcccagcttccagcagggttacatcacccgtacgctggcctcagctggtctgtacaaggatatcaaggtagcggatggaagtgtactcaatgatcgtgcgcgtcgtagcacctttgacgtcgaccgcatcaacttccactggggtatgaccacggagaaggagaactacattaccgacctgctcaccaaggagattagtggtgtcgtgggcgacaatgctaagctcgtcgagaagttcaacaccacagacgacctcttctaccgccgtggcttcgcctatggcggtgtcaacggggacatctttacctatggtcatggtgtgaagggacagcctgcaccaggcggtgccatctacgacttcacgcagaaggcttggaacctcacctaccaggcactgcgcctcttctctaccacctatcagggtgcagggaatacgcctcgtcacctgacaacgaatgacccgaactaacgggtatcagtcgccacactgacacaagaaaggcttcgccccagatccgtctctacgagatggatctggggcgaagccttttgtatgcggtaaagagagcgaagctctttagttaggagcgaagagatcgttcagcgcctctgcgatcgtgggatgcgtgaatatctgtgtgcgcagagcttccgctgggatctgatgatccatcgccagcttcagcaggttgatcagctcatgtgcctcgggacagaagagcgtagcaccgaggatgaggcccgtctcggtatcgacgatagccttcagcaagccgtgcgtctcgccaaggaccttcgccttagggatagccacggtctgcagtcgcttgacttcataggggcgacccgaggcggctgccatcgtctcggtcatcccgacctgtgagagcgcaggtgtagtgaagacgctggtaggcagtagcaggcggtccttcgtcgtacgcttcccttcgcctaagatctgatcacgaacgatgcggtaatcatccaacgagacataggtgaactgcggactccccgccacatcgcccatcgcccaaatatttggtgcagcacgtagatattcatccgtctggatgaagccacgagaagtcagctggactccagcggcctcaagatgcagcgcctctacgttggggcgacggccaatagccaccaggacagcctctgccgcatactcaccctgcgaggtcactacggtgacggcctcttcggccgagatgaagcgcttcgtctcagcttggaggacgaccttgacaccgcggtcggcgagcatcgccagcattgcctcggcgacatcgcgatcttcacgagcgaggaaagtatccccctgctcaaggatcgtcacctcagtcccgaaggcagcatacatacaggcgaactccagcgagatatagcctccgcctatgatgaccagccgtgcggggagcgagtcgagctgcaggagccccgtgctatcatagatacgcttgtcgtcagctccctcaagagccaaggtcgctgggcgcgctccggtattgatatagatgcgctctgcctcgatctggcaagctccatcttccgtcaagacttcgactacattcggagagaggaagcgcgccgtacccgtcaggatctctacgccagggatcgtagccagcttattatagttggctgctctgagggcggaggtcagctgctcacggcgctgcatcgcagcctggaaggcagcagacttatccgtaagacgagcgctcttctcgccctcgaccagcaggagcttggaggggatacagccaatgttgatacaagtaccgccatacatcgcagggctttgctctacgaggatcacggactcaccgtgcttcgccagatcagctgccaaggtcttgccagccttcccgaagccgatgatcagatgggggatggatcgtgttgtcatcttctaatgagtttataagttgtttgctatacaacacttcgggatagcaaatggctcatttacggcgcggcatagagtagtgcacacccatctccccaatatgcctctccgaagggatacacaagcctttcgccttatcgcgagtattcctcttatccagcggagggaaaagtatccttctcgtgaaggaaaaagcgccttcccgtagtggttttcctctgtctatgcacgtagtcttaaagaccaggcacgtaaatccaaatatccacgtacgtagatattagagccacgcacgtagtccaaacttatctaccactcgtccacaacttttatccctgcgcggagcaacaactctaatataggtcacttcacaaagctatatagctttcttcgccatcctatatagctctacccgcgaacccatacgcctatatatgagaacattgcgcaataccacctcttcattactcgtaccttcttcccccgaaaattggagtctttaggctgagaagtgcgaaggagagaagtacgagctgtgaagagatggccttgcgcaatggtctcaagtggttcattcggagagtttattgtacctttgcaccacgatccgtacgtcgtctgactgcttccgcaccctatggcaagcccacaggacgaagaagacgagctgacgacggcggtattttgtttcactatttcctcaagtacaagtatgtatttagattcagctaagaaggccgagctcttcgaaaagtatggtaagtccgctacggacacgggtagccctgaaagccagattgccctcttcaccttccgcatcgcccacctgacgggtcacctgcagcagaacaagaaggactacagcactcagcgcgcactcaagatgatcatcggtaagcgtcgtcgcatgctcgactaccttcagaagatcgacatcgagcgttaccgtgctatcatcaaggaactcggtatccgtcgctaagtgaagacctcgctccctcgtggagcgaatccccttcgaaaagaaaagctccgccccagaccagtctctacgacagggtctggggcggagtctttatttctatctataagggcgagagcctcttgctactgtgaggggcttactcacgtacgggggctgcccagaggagcttcttacggagcgtgtcggtgaaggagtgagagtcgagatgcaggaggcaaaggctattgaccgacttacggatggtgatcttcgcaccacaaggcaggatcttcgtctgcccatccagcacgatgaggaaggtattgttgcgcgccgagaccgtgagctcgatcgtctcgtcctcggggatgaccaaggggcgcatcgtcagcgagtgaggcgcaataggtgtgataagcatcgcccgaacctgcggcatcatcagcgggccataagcactgagcgaataggccgtagagcccgaaggtgtggagatcacaagcccgtcacactcgtagctggcaagctccgtatcagcaagtcgcgcgtgcagcgtgatcatcgagcccgtctcacgcttgaggagcgccacatcattgagcgcctcgccatagtgcgcaccatcgacctccaccgagagaagcatacgacgctccgtcgtatagctgccatcaaagagccgagacaagagggggagcgcctcctggacactgcgatccgtgaggaagcccagacgccccatattcagtcccaagacgggagtaccttcggcaaagaccctacgggcagcacgcagcagcgtaccatctccccccagactgatgacgaagtccatatccagcggactgtagtctgctggtatataacctgctatcgtggggtgcagatcgaagtcagaggtcagcgtgcggtggaagctacggtcacaccacaagctcacatcaggcctatcaagaaggtgaaggagctcggcaagatgggcggcatgagccgcaaggtgtgaggaggcgatgagcgctatcttatacataggggtggctgaagaagcgttaagttattgtaggtaggtcaaataaacttaactttgtatttcggggctcttcgccctgtctacaaatgtataaaagttcgacgtatgactcaactaagcgtcaatgtaaataagatagctaccctgcgcaatgcccgtggcggcaatgtccccgacctcatcaaggtcgcgctggactgcgagcgcttcggagcacagggtatcaccgtccacccacgccctgacgagcgccatatccgctatcaggatgtgcgtgacctcaagcgagtggtcacgacggagttcaacatcgaggggaaccccatcccctccttcatggatctcgtcgaagaggtacgcccccatcaggtgaccttagtgcccgatgcccccgatgctctgacgagtaatgcgggctgggatgtagctcgccatcgcgacttcctcacagagatcctcggccagctccacgcttggggcatccgcacctcgatctttgtcggcacggatctcaagaaccttgatgcagctgctgcccttggcaccgatcgtgtcgagctctataccgagccctacgcctcggactatcctgcagatcgcgccaaggctatagctcccttcgtccaggctgctgagcacgctcgctccctcgggctggcgctcaatgcagggcacgacctcagtctggagaatctccgcttcttctccgaatccatccccttcctctccgaggtctccatcggacatgcactcatctccgatgccctctacctcggcctcgaggagaccatccatcgctaccgcgcttgtctcgcaggtaagtagcaccgtcccataagcaaccatcctttcacatttatatcgactataattcacgtggatacaaccgcaacagcctctctggctcagactctcgctgacacggctcctcaggcctctctctctatcctcgacctggctaccaagggtggctggatcatgatcgtcctgctcgtactctcgctcctggctctctacatcttcgtatcgaagtacctccagctccgtgctgcaggtcgcgaagacaagtacttcgtagagcgcatcaaggactatgtcctcgaaggcaagacgccctctgccatcaagctctgtgaggacaccaacaccccctatgcacgtatgatccgcaagggtcttacccgtatcggtcgccctatgtctgacgtcctcgtgatcgtcgagaatgcaggtaacatcgagatcggccgtctggagaaggggcttcctatcctcgctaccatcgctgccggtgctcctatgatcggcttcctcggtacggtcaccggtatggtacgtgccttcttcgacatggctaacgctggctcaggcggcgtcgacgtagcactcctctcgggcggtatctacgaagcgcttgtgaccactgtcggtggtcttgtcgtcggtatcgtggcgctcttcgcttacaactacctcgtcgcagagcttgacaaggtcggtggtaagatggagactaagacgatggagttcatggacatgctcaacgaggtgcactaagccctgagctgtagcccatctcaccttacccacgaacgcatggcactcaagcgtaagaccaaagtcgcagacaccttcagcatggcctcgatgacggacgtcatcttcctcctgctgatcttcttcctggtgaccagcacgatcatcgtacccaatacgatcaaggtcaccctccctacctccgcccctcagtcggctcccgagacgccctccgcacgcgtcacgctgacccccgacctgcattattatctctcgatcgaccgcggcacccccaccgaacttacccgtgaccagctcaaggagcagctgggtatcttcgccgcagagcaccccgaggccttcgtctccgtacaggctgatgagaccgtgccctacaaggaggtcgtcgccgtcatcaacgccgctgctcaggcttccctcaaggtagtcctggcgacgcgtgccgagagcgagccagtccaataagcctcatgccacagaccgatcccgccgccccacgccgtggagccgtcgccgccctggtgactgtggcttgccacgtcctcttcctcctcctactctgggtcctcaagctcagcaatgaccgccctgcccccaagccaacggaggtactcatcgcggtcaatgtgggcaacgtggcctctgctgcaggggccatcgagcctggaggtacacccgacgtcactgagcccgctcctaaggtagcagcccctcccaaggtcgctccccctactcctcccacgccacctgcgccacagcccaaggcgcagcgccccaccccacgcactcgtgaggtagaccagcccctacagactcagcagcatgagcagagcctgcaggtagaggctacccgacgcgctgaggccgagcgccaagctaaggccaaggcagaggctgcacagcgagctgcagaagctctcgcagcctcccgtcgtgcccaaagccagcagataggcaactccgtagcgggtgccttcggtaagcaggctgggcaagctggtagccaaggtacggctgcctcgggctcgggcaatcagggggatcccaacggaagcccctccagctatgcactctctggacgtaagatcatcagcaatggcggcgctctcgtcgccccacacgtacagcgtgctgtcgagggcaacgtgcgtgtgcgcatcgtcgtcgatggcaatggctcggtgatccgtgctaccatcgcgccagggaccaacatcgctgatccctccgtccgtgccgctgcccttgaggcggcacgtaagacgcgcttcaatgccgtgcctggctctgacgaacaagaaggtagtatcacctaccacttcaagatccgcgcctaagaccggctaacctttataccaagttattcatatgtctaagaacgtgtacgtcttccttgcggaaggctttgaagaaatcgaggccatcgggacgatcgacctcctgcgccgtgcaggcctgcccacgcacatcgtggccgtcggtctggagcccaacgtcacgggggcacatggtatcgccatccaggccgacctttctatcagcgaggtctacaatgatgacgtccttgcactcgtcctccctggcgggctccctggtgtgacgaacctcgacgcttcacagcgtctgcatcagctcatccgcgaagctcaccaagaaggcaagctcctctgcgctatctgcgccgcaccctccgtcttcggtggtgctgacctcctcgaggggaaggaagctatcgcctacccaggctttgagaagaacctgaagggtgctaaagtctccgaagctcccgtcgtcaagagcgggcacatcatcacggctaagtccgcgggctataccttcgacttcgccctcgagatcatcaccgctctcgctggagaagagaaggcaaaggaagtggcctcaggtatcatctacacgcgccactaagtcgcccccttacagcaaagcgaagcgctcccctacctcactcggaggtaggggagcgtttccttttgtagcaaacagctcgaggctatagagcattcctctactaaaatcacctaccagctccacgacgaatctttatcctctgcagtggaggaagcatgaaacaatactgatatgcctatatcttggtacgtagtctttagagctacgcacggagatcatataagccacgcacgtggatgataaatctacgtgcgtggatataaggctatccctattggtgcgaaggataaacccatagtcctcgggaagaatagctgttgagagtcaagataaatccagagaaagagcgtgcctcctcccaccattggtgttgagagaagctacgtgcacgatgtcgcagctcgcgataccccttcgccgaggacataaaataggtagacgcagggacctacgagagatccctgcgcctactcactaacaaacaaaccgcagcttgcctataaacttaggccaactgtaacccagagagaggatttccctccagagtaggtcggtgccatatacgtggcatcgagggctaagggcttgaagcgcaggccgagccctgcactcacgcccttcgcaccattggtatcatactgatagccggcacgcagtgctacgagctggtggtagaggtattccccaccgaagtggatagcacttgatgcggcattcgaaggagcgaagaagtagtctacgcctgcgccgagggccagacgatgctcaccgctgatgccgtagctgatctcaccaccggcgcccgcataggcgggggcataggtcgagctactcttggcgctctgcttgtacttcgcaccaaggttatcgaccttcgcaccgaggatgaaattcatccccgtagcggatggctcttcgctactgcggaggaagacgcccccaccgaagaccatcgttgaggcagcagccccttggtcggtgtagacgtagctccccttagcgtaggcagagaagacgcccatacggatagcgtagccgaggtcgacggtgtagtcgaagagctggcgcgtcttcttcttagcgttctcattctggtcgatcggcgtgtacttcataccaccgagatagcggaagccgccgaagaaggcatgacgtccgacgcagatgccgagcgaagcattgtagaggttattcgtgccgtcgaagccctcgaccttgccgagggtacgaagaccgccaccgagagagaggaccgtctcgccgtagaggagcgaggtggggttggtgtagagatgagatacatcgctctcaccatagtggtttcccccgagggctgctgtctgcgcgctctgagcatactcgaggataggcagggcacgtgtccccttgatcttctgggcctgcagcgtggaggtagcgcagaggccagctgcgagcagcaggatagatgctttggtattcataggtaggatgcgttatttcttgacaaaagccttagtgtagctaccctgagcggactgcacacggagcgtgtaggcgcctggggcgaggttcttgacgaggagctttaccttaccgatcccagcgacggtgtagtcacggtcaagagccttgacaccggagagggagtagatctggatgttggcgcgctggatagcgggattcagcacgatgttcagctccgtcgtagcggggataggatagactgagtagacgggctcagaggcatccttgacgacacgtacagggatagacgtctgcacgggcgtgctgataccatcggaggcctctacctggacctgagtcgtacccgtcttcagaccacggatcgtgagcttaccatcttcggcgatagcggccgaagcgatagagccgtcagcgacgctggccttgtaggtaatagtcacgccgtcactcttctcgagcgaaggtgctacctctaccatcgtggactggcccatcccgacgacgtggttgccgagggaggcgatgaaggcaggagccttataggtgtagacttcgaaggggatcgtcagctcggtctttgccccgaggacgtcggtagcggtgaccttgatctcgtgattgccgacgggagctacagcacgcagcgagaagatgaccttgtcaccgctgacctgatagctcaccccacgggtctcaccagcgacattgatgctgaccttctgctggtcgggatcagagaacgtgacagagaaggtttccttcgtgagagcagagacgcggatcttcttgtcggtagagagcgtcagcacaggaggattattcttcttcgtcttgaactgacccatcgtcaggcccgacttgaggccccagcggtcgatagcttcgatagcgatatgataggtggtattctccgtcagagcactcagcgggaggaacatcttcgtgccagcagcatagcccgtagcattgatcttggcatagtggacatcctttgcattagcatcggtgatctccttttcggagaggtagacgttgtattcgacaggcgcatcatcgtcttcgtcgctgacagcagcccaagagatgttggccgtgacgaaggagacttcgtcgacattgatctgagagaccttagcaggagccttgcccttattttcagcgaagacagccgaagcatcgatatagccacgacccatacgacctgggtagcccgtgagcgcatcgatattctgagccttcagagcaccgagcaggcgctgctgacactcgacgttcgtgaagccctggcggccgaagtgcgagacgataagggcggcgataccagatacgtgaggacaagccatcgaggtaccctgcatatagccgtagtccttacccgtaatcttcttagagagcgtactgaggacttcaccctgaggatagtgagcgtcaccaccaggagcggtgatatcgacccagtccccacggttggagtagtaggcagacttccagtcaggagccatcgaaccgacggccacgacaggaggataagcccctgggaaggagcggtagtccagcccgtcattacccgcagcgaagatgactaccccacccttcataggcgagttgggtagctgattaccatccttgtcgcagccagcgtacttgatgaagtagtcgatagcagccttctggctctgagggatagcggtgatgttggccttgtagatatagccccaagagttctggctgatgacagcaccgttattggcactgtagacgatagcgttggcgctgttaccgccttcacgttcgcccccgaagatctgacagctcatcaggcgagccccagagccttcggtaccatcacccccagcgataccagcgacaccgataccattgttgttgcgagctgcgaccgtacctgcgacgtgcgtaccgtgggactcatcgtcgggatagatcttaccattgttgtggatgaagttgaagccgttgatatcgtcgatgaagccgttgccatcatcgtcgacaccttcctgaccattgagctccttctgattgacgaagaggttgtccttgaggtctggatgggtgatatcaataccaccgtcggtgatagcgacgatgacgttaggcttacctgtttccttttcccaagccttgaagaggccgatgtcagcaccagcgacgctgcgagggaagcggccggtattgttgtagtgccattggtcgccgagcatagggtcatcgaagggagctgcgggagcatcgcttctatgaggagcatcgacagctacagccttgcccgtaggacgagcgatctcgtagacgggctcagtgtattcgatctcgggcgtagaggcaagggtctgcatagccccctggaggtcctgctgcttattgaagcggacgacgtaccaaaggtccagaccttcacggcgcatacgttcctcgaagcgtgggtcaatggggaagaggggctcgagggattcggtgccgatgctacgcagggactgagccatctgcgagggcaaagaactcatcgaagcgccattagcatcgaaggcacgaaggctgctcttggctgagcgctggatgcggaaatagaggaccccagcctctgccccttgggtagacaggaaggcacgagcgggtgtagtggggctaccggtctcagaggcctgaggctctctctgaggtgtcacttcatcgaaatcccgctgacaggaggtaacggccagtgccgagagaagtgacagggtcagtatagatcgtttcattgtcgtagtcttatatgtgtgtttagactaaggcgcctgtcgctggaagggacttcaccacgaggggcgcaggagggaagatcgttgggcgggcatcccgaggttagtgaggcgggtatgcgagccagagggaagatggagatgaagggcttacttgtcttcatctccatcagcctatgggaggggggctaacccctcccacggctgcgagatgcgggtcatgggaggcggtgggctggaggtgagtcacccaccgtgagatgcacgatcgggcgatgcatcttgctgtggtgtccttagtggtggtagtgctgtgtgtgctgtgtgactcttgtggtgtgtatggagattataatgaagattgatcggatggcatagggctacttcttgcgacgagagagatggcgctccagcgagctacggatagccgaagcatcagccgaaggcttgtcatagtagcactggatctcaaggatcgacttcccgccctccttcacaggtgtgaagatataggccttacctgtcttcttgttgaagaaggcttcattcccgccagggaacgtaccatagaaggggaagcccgcagcagccataaattccatgacttcacgcgtcagatggagcttaccgacggggtcacgccagaaggccagactcagatcagcatacgcggcctgcagcccttggacatgattgatataggggtcaccctcggggatctctgcatcagctgtcgtgtagaagtagccacgaagcagctcggtctcacgatctcccgtagtagactcagggatgaagcgatcgtatccaggctcactgatcttcgtatccaagctgctcttccaagtcttctcctgagcacgcacctcatcctgcgaggctccaagcttgcctaaaggacgactgccgaggaaggcatcttgacgatgcatcgggagcttagtgaaggtgggataagccttatcctggatagccagatagaccgtgcggatggaagcatcatctgtcccgaagacgacggagaggagtgctgggaagtccttcttcgtatagacaatcaccttgcctgccttctcttcatgatcgcgagtgaagccatactcgaggaggaaggcttcgaagtcgggattgtccttgaccagcgagatatcggtacactgcgtacgagtagcatagtagacctcatcgttgtcctggctgtactggtactcaatataagggatgagcttactacgggtcatgaaccgataggaggcattgctcgagaacccatcggggacgcgcaccatgatatgccctcgaccctgctcatactgcatcacctcgccaagacgtgctgggaaggtaagcaggggcaagacatagggcagtgagccctcctgctctacagcgagctcttggacgctattgccgctggcgatagtcaccttggtcgtgcggcgaagcttctccgtcgtaggctttgccacgagggtgaagccgtcacgactctgtgactcgaccgtcagccagtctgtgccaggggccagatcgacacgtagatcagctgcattcgtcttaaggctcaccgtcttacgccccccttcacggaagaaggagatctgcatggtctcgggctgaagcagaatatcagcagcactctggcgaacggagatacgacgctgggtaccaccagcattgacgatgacagcacctgtacgctcacggcccatctcgttagcctcggccttcacatggagggtattaccttcctgacgaagggtaatccaagaggcctcttgcggggagaaggacatccaagtatcacgattcgtcgagatagtcacggtctgttcgccggcttctttcgcaaaagtcaagctctctgcggagagatccagggtagcctcctccacatcgctctgcccttgacaggaggggaggagcatgaggagcgcgagggcaccaagtaggttcagtagatgcttcatattagaagtaggtaatttggagcgtgctggcgggaggtgcccgccagcacgagtgaatgtggatcagcggcgggactggaggagacgcgtcttctgcagatgacggctgatggtctctacgatacgagcacggcgctcgaagaggttttccttcttagcagccttcaggcggggagcagagccagcaccaccaggcagctcaacgaggaaggtctggatctcaaggacgggcttaccatccagctgagcagggtgcaggatgtaagcagccttctctgcagcattgtagtaggcgacgaagccaccattgagcgtacggaggtagttgtagccattatccttgaggagctgctccatctccctcgtcacataagacttgccgagagggtcggtccaaaagccgagcgtgacgtcggcgaagatggcctgcgtcgtgaagacttcgcctacaaaggggtcatcagcagggatatcttcgctgggctggaggtagaagtagccacggtgagactcaccttcgagcgaacccttagcgatgaagcgctggtagtcttcgcgattagcgcgggggtccttcacatcgagttcgcccttccattcgacttccttcttagcgacatcatctcgcttgtagccgtggataccacgaccgcggtcacagttcagagccagcagctgcttcataggcaggtggtcgaaggtcttgtaagccttaggctgacggggcatatagaccgtctcgaggagtgcttcacccgaggagtcgaaggctacattgaggttgtagggaagggagctgtgtacatagacgtcctgacctgcattgctcagagcgtcggacttctgatagccacgaccctgcaggtaggcgacgaaggtaggattgtccttcaccgtcttgtcatcgagacagagctggatcgtggcctggaagcccttgctacgctcgtgctcgaactcatactcgatcagagggaagagctcgctctgcgtagcatagcggaagacgacggcactaccacgggtgaagctacgcgtcagctcgctcagacggccacgctcgaagcggatgacatccttgagccctgcggggaactgctgcaggggcaggacgtactggttggcaccatcctgagtgacctcgatctccttgagctgggcaccagctgtgatgacgaccttcaccgagcggggcgcatcactttcgttgcgctcagcggcgagggtgaagcttgacttcgtcacttcggcgagcttgagccaagaggcttcggctccgatctccaccttagcagtggtgttgctctcgaagacaaccttcttcgtacccccttcgatggggaagacaaggcgctcaaggtcggtggcgaggatgacgtcgccagaggcctgacggacggtgacgcgcttctgcaggccaccagcattgacgatgaccgagccgacgcggtcgttgcccaggtcattggcctcagcacggaccttcagagtattaccctcctgtgtgaggcttagccaggtggcttcctgtggggagagggcggaccaactttccttgttcgtcgagacggtgagggtctgctctgaagcctccttagtgaaggtcagtgtctcggtggagagatccagggtagcctcctctacgtcgctctgtgggctacaggcggggagcagggcgaggagggcggaaagacccaagatacggctgattgtctttctcatcttgtttgttgttagttagtggatataaacttggagcactcaacgtatggcacgctgagagagggcatccagacgacggaggaaggcggcacgcttcttctgtgaggtgcggtggttcatgaactcctggacggaattcgacccatcatcgatctcggtgtagtaagcctggacgtcgaggacgcgctgctcctgatagaagaagatacgtatggtgtaggctaagttcttcgcacgattagcgaaggcatagctggcattctgcgtctggcccatatactcgtagccggcggaggtgaagagcttcatcacctcatcggtgaggtgatagtgcccgtcgatctcatcgtaccacagagcacgctcaagctgggggaagtagcccaagacgctattcacgacacccagataggggtcgtccatctgcgtcggggtgatgatgtagaagtagccgcggatgacctcatcttggaaggagtgcttgggcttgaagaggtcgtagaagtcgggggtattctcaatgcgttcgctcccctcggtctgctcgaaggcacgtacatcctcctgcttcttacccttgatatccagctcacggctcccgaggaactcgatctggcgcttcagaggcatctcgctgaaggtggggaaaggctttgtctgcgtggggttgtagacgaactgcaccttcgccccgcccgtgaagatcgtcacgaggagctgcagagggagcttcgtattctcatacagcgtgtagaccaagtcgggcgaagagctctgcttgacaaagccataggcagctacggcttcgtcgaagtccttgttccccttcacgagatccttatccgtatagatgagggtagcgatagagaagccggggctattcgtcgcgctgaactgatactcgatgagtggcacgaccttgctcttcgtcaggaagcggaagctggggtactgctccttcgtctcctcacgggagtagagaagcgtattgcctcgctcatgctcgtagcggacgatatcatagaggcgtgaggggaaggtcagcatggggaagatgtagggagtgagtcccagctgggtgacctccagctcacggacggccgtccctgcggtgagggtgatcttagccgtgcggttgtgcttgtcggcattggcctctgcgacgagagtgaacgtcttagccgtgcgcttatcgacacgaagccaagaggcaccctcggccagctcgatggtgagagcatcgctattgcactcgaagctcacctcgcttgacccgccctcagcctggagcacgaccgactcaggagcctccaggaggacgtcggccgccgtctgatgcacggtgacacgacgctgcaggccgccagcttggacgaggacagcccccgtgcgctcctgcccagaggcattcgcttgcgctccgacatagagggtattgccctcctgtcgtagggtgatccacgtagcctcctgcggggagaaggctgaccagctggactggttcgtcgtgatggtgagggtctgcgccgtgccctcacgtgggagcgtcagagcggtggcagagagttcgagggtagcttcctccacatcgctctgagggcgacaggaggggcaaaggaggctgagtaggaatacgctcaagatcccaagaagggcaaagtggaagcgtctcatggtggtaaaattgcgtgtggtgtgtggaaggtgtgaaaggaagaaaagtagctgttcgttataagcagtctgatttgatatggagaggaaaagctggaggcggggcgagatctccccgcctccagcgggagtttatctatagaggttgagtgggatacttagtccttgtcgtagtagacttccgcgacgagctcgaccccctcacgagatctgtcagggtcgcccccccagaaatcgaagccgtaagtcaggcgcgtaccataattccggaagagtcgctgaggagtaccaaggaaagtgaagccagccttctccatcagacgtgtaagttcatcggtggcgacatagctcgtacctcgtgcgtcgtagcggatccccagaccaagattcttgtacctacatctgatcttatagatgctcctgtacttacccttcagaccatacttttcatcaccatggtcgtagaagaaataggtacgcttgtactctccatcaaaggaggtcttcacctcgtaggtgcgactcccatgggagatatgctcttcactccccagcttttcctcaaaggcgctgacctcatctatcgtcttgccagcaaagcccttcaagggattctcgaggtagtggagcagattctgcatgggcaccttcgagaaggtcggatagtgctcattgggatactgcgtaggctcatatctgaactcaagcagccccttaccattcttctcacgcacgagaagtcgcagctcggggtagtacttgttctcatagtaggtccaatacaggcctctaccttcagaatagctacccttatggaagaagccatggcgagcgacgacctcatcaaactccttattgttaatcaccagcttgggatccttgtaggctacaaatacggtctcaaagccagagacagacgcattgccatacatgtaggttatactcaagacgtcctcactcttgggcttgtaattgtagtacttcccagcagggaactcttctaccgactcaagcacgctaccctgcttcgcttcgtaggccttgatggcatcgagcgtagagggatagatgagcaaggggagggtgtagcgcccgttgtctatcggtaccgtaggacggggtctgggattaggttcgtcccccgagccattgccgctacggctacacgagctgagggagagagcccccacacagagggccaggagcagatgagatgtacgcttcataagctgatctaaacgggatataaattagataaggagccaaggcctaaagcctctatctggctacgataatactaatgggaagcccgacgtagcgcacgtggcgcgacgagttcgctcagtcggcgcagatcctcacgacgctgcttgaccgaggctcgatagtcgagctgggaagcgagggaggcattggcactcttgaccttagcatagatcgactggacttgcagtacctgggtcgccccatcatctactgcgcgcaagacatacacctggagccgctccttattatagaaggcgtagtcgccattcttcagcttcccgaggtagggatagcctacccctgcaaagaatgaacgcacttcattggtcagatagtgctttccggtgattttatcttgccagtaacccatggtgatggggaagaaagcattgaccccgacgcagacatcgatgaagggatcatcctctgcgatccccttgtcagggttagccacgacgaagagataggcacgtacatcctccccatcgaaggacttcttcacctgatagacatcagctgagggatcgccgacatcgaagtattcgctacccagcgcttcttcatccttgcggatctcagcgcgcttcttacccgccttatttagctcacgattgcccatgtaggcagtcatgcgagtcataggcagcgtggtgaaggtcttgtaagcctggggctgctggggctggtaggtgaactccagcttcacgccatcggagaagtagtacgtctgcaggctcacggggatcgtcgtgctcgtgtagacggccatctgatcggtgctcttgctgagcgtgaagccgtggtccttgagataggcttcgagggcggggacatcctccttggggttgaagccgaagaagagggtctcagccgacatgaagccggggctgagggggacgttgaacgtgtactggatgaagggcacggtcttatccttcgtgaggaagcggtagaccgagggctcatcttcgccaccattgacagactcgaggaggatatgacctctgccctgctcgtagcggatgacctgatagaggtcagcggggaactccaagaggggtaggagcgtcgagggaagaccttcctgcacgacctcgatctcctgaatgctattgccacggatgacgttcaccttagcagcacggcgtagcttcgtagcgttggcctgtgcgatgagggtgaagcccttggcactggcagctgagatactcagccagtccgtggggacggcgagctcagccttagcatccgccgaagcctcagcgaaggtaatgagatgagagcctccttcgaggccgaaggtcaccgtttgctccagcgtgaggcttgcctcaccggctgactgacggatagcgatgcgacgctgcaggcctccggcattgacgatgaccgacgttgtgcgctcttcgctgcgagggttggcagggacgctcacacggagggtactcccctcttctttgagcttgacccaagcgtcttcttgtggggagaaggcgctccagttctcgcggttggtagtgatcgtgacgacctgctcaccgccatccttagtgaagcggagggtggagggagacagctcaagggtggcttcctcgacgtcgctatcaggcttacagccggtaggtaggaggaagacgagcgccagaagcgctaataagtaggtagatatggacctcatggtgggtacagagtaggaggacattggcctctccgcttcggtgacgagcgtgtgtgctaagtgtgtcgcctgcgggtggaagaaatgggtagagacggatataagcgtgcgatctacgaggtagcgcagctggagtttgtctggtgtagaatgcctacagatcccacggagcgaagcgctctacgggcagagacataagaaggcgatagggaggacgagcagcggacgagctatgaagagggtactgtggtggtagctccgtgcgtcgtaggcgtgtggtgggtgcgaggtgtatcgtgtgtgtggccgagaggtgagcgtcttgtgtggaaggaaaacagggcttccaaggctctatctacgcggagggaggccgccccaagccgacgtagttgaagggattcttcgtgagcctcagtagcccaagggcatatctgaggttgatgattcgatcatgagtgttctgtatttgcagaggctttgtgcctcaaccgtggatcaaagttagagatttgtttcgggaaatccaatactaacgagcataaagttagccttacactttactgtcatacaccgcaccgtctcaagggggaaattctcatcacagacgccacctccgccccgacatcacaccccatacattccgagcgaattagcacatcacgagaagcatcctatagaggagcccaaatccaacctatattgctcggcgggctgacctatattggtcagttcacggacctatataggtcgtcatcgtgacctatatagctttgtgaagtgacctatattaggttgttgctccgcgtagggataaaagttgtggacgagtggcagataagtttggactacgtacgtggctctaatatctacgtacgtggatatttggatgtgcgtgcctagtctttaagactacgtgcatagatgaggaaaagcctctacgggaaggcgctttttccttcacgagaaggacacttttccctccacagaataagaggaatactcgcgataaggcgagaggcttgtgtatcacttcggagaggtatatcgggtagctgagagcacgatgccttagcacaataaatagagagcaggactctcctgcaacagtctcatataggtcagcccgccgaccaatataggttcgcactaccccgctcgtgaggaaacagaaatagggcgcccgggccgaagcccgaacgccctatccgtgtggtgcggtacacgggaagattagtgcccgaagatagccttcagctgagcagcgaaggcacgatcctcagcctgctgagcacgcagggcgcgcaggtagctgggatagtcggagagggtagccactgagagggtagcggacttgttaccacggtcagcgtaggtggcttggatctcgaggatatagcggccttggtaggtctgcttaggtacagtgaagatgaaggcgagcttcttctccttgttgtagtaagccttactatagccttcgaggttctgcaggaaggtatagccgttgtcttcaaggagcttgatgacttcattggagaggtggaagtcgccagcatagtcacgccagaaggccagctcggtattgtggtagatggcctggatccccttgacagcatccacgtatggatcatcttcggggatcttcttgtacttgtcagcgacgatatagaagtacccacgagcgaactcgccgtcgaaggccttcgtcaccatgaagcggtcgtagtacttacgatcgtgtggttcagcccattcagagccccattcagcttcctgcttgcggatctcagcacgcttagccttcatgatgtccagctcacggctgctgaggagcttgagctgctcggccagaggcatgacgtcgaaggtcttgtaggacttgcgctgcgtggggcgataggtcgtggtgatgacagcacccttaggctggatcgtcacctcgatctggagctggaggctttcgctggtgtaggtcgtggtcttaccgtccttagagatcgtaggagcatcgaagccctgttccttgacaaaggccatgaactcaggattgtccttgacgagcgtgctgtcggcacagatagacatagcagacttgaagcctggagcactggggtcagtgaactcatactggatgaagggcatcgcttcactgcgcgtagccacgcggtaagaggtcgtattgaagaggccgtcagggagctggataagggcgttaccacgagccatttcttcgctcatcacggtagccagcgaagcggggaacttcaggataggcaggacgtactgtacagagccttcctggatagcttcgatttcggtgagggtcgtaccgacggtcaggaggaccttcacacggcgacgatacttctcagcactttccttcgcagtgaggacgatgctgccatcagcgatgcgatcgatggtgagccagtctgctggggtagccagctcggccttgacggcaccgccattgctcgagaaggtgactttcttcgtggcaccagccttggggaagagcacgaaggtatccgtcatctcgataaggccgtcagctgcactctgagtgacagcgacacggcgctgtgctccaccagcattgacgatgatcgaagcggagcgatcgacaccacgatcattggcgctggccttgaccttgagcgcattgccctcctgtgtgagggtgagccaagattcctgggtggtgaaggcagtccacgtgtccttgttcgtcttgacggtgagggtctgttcgccaccatctttagtgaaggtcatgagctgcgtggagacatcgatagtagcttcctcgacgtcgctttcgttcttacaggctggcaataggaggagcaggcccaagcagccgatgaggtacttgagatacgatttcataatgtgtctttgtgtgtggggatggtgaacccaaggcgaggcggtaaggtagggccgatctcacctgaggggagtgtgtgatgtgtgcgtctggtgacggagtcatacgccccaaggaggcagggtgcccggagcatatcctgggcaccctatcctcttagaggggagtgaccgcagccttagcggaagagaggtgaagctaagatgcggcgttcgagacgacggataccttcgtcgtgagccttctgagcgcggatgctacgtccgtagttggagagcgtagcgatagagctagcgccaccagcctcgatcttttcgtagaaggactgcatttcgatgatgggtttgcccttatcgaaagcaacacgcatgacgtaagcctgcatcttatccttgttgtagaaggcatggtaacccttgttgcctataggacggaggtaggggcaaccagcttccttgaagagtgcaagcacttccttcgtcagagcatagcgaccgatagcatccttccagaatgccagctcaatgttagagtagacagcctgtgcaccgtgcatatagtcgatgtaggggtcattttcttcgatcttatcttccttagaaggacggatgtagaagtaaccgcgatagatttcttcttcgaaggccgtagtacccgtgatgaagcggtcgtagttgtcctgcgtgatagattcatcgcgcttagaaccccaagcttcttcctgcttacggatgtcgtccttcttcttgtccttgatgatcttgagttcgggattgctcatcatctcggtctgatgcgtcataggcagcgtcttaaaggtagcatagtccttatcctgcttaggagcatacttagccgtgatgatagcaccacctgtctggaaggctacctggacctgcatggacagcttctcattggtataagtgacggacttgccatccttaccaacttccttcgtttcgaagccattttccttgaggaaggcatcatagtcggcgttgtccttgaccagagtcacatcatagcagagcgtagaggcagaagaaaatccggcagccgtttcgctactgaattcatactgcatgaagggcatgatcttactctgcgtagcgaagcggtagagcgtcgtgttgaagagtccgtcagggagcttgatcagttcgttgccacgagtcttttcgtagcggatcacttcagcgagagtagcggggaacttcaggtagggaagtacgtagtacatgatcccttcttgagtgacttcgatttccttgatgacggtacctacggtgaggttgaccttgacgctacgcttgaccttctccgtgctttccttagcggtgaggacgatagccgtaggagtgaccttgtcgatcgtcagccagtcgacagccgaagcgagctcagccgtgacgttgccaccgttgctggagatagcgagcttcttcgtttcccctgcggcagggaagacgagcgaagtagcgtcagcatcgaggatgacgtcagcagcgctctgcttgacatctacgacgcgctgcatgccgccagcgttgactactacggaagcagcacgatccatgccgcggtcattggctgtagccttgaccttgagggtattcccctgctgctctacggtgagccaagagcgttcggtggtgaaggctgaccagctgtccttgttggtcgagacggtaagcgtctgctcgccgccatccttggtgaaggtcacactctgggccgagagatcaagggtagcttcttcgacgtcactttcccccttacaggcggggagaaggaagagaagcgccaagcagcccaagagatacttgatatggagtctcataattgtagttgcgttaatgtggtgtcgagagggtacacgaggtgccctctgggaatgtgcgtaatggtaggactgcatccctgagacacctcgggaggggactctgggagcgtatgagacggtatggtggggacaaaggcttgatgatgcgtgtatacgacccttagcgaggatcgggaggagcctttgcgtgtgcgtggtggtgtccgccgaagcgggggaaggggtatgtggccgagtgagcgtctgtcgggtgtgtcggggaagtaggaggactgctcgagctctaaattgcgccgtgggaggccaacccaatgaggggcgtaggtgggattaccgagagctccaggagcccagagagttgtcgtgggaggtttgtttgttcatattgcgtttgctatcgatcggaagcatagagccccgagatcatgtaccaaaggtagagaatagttttgtgaataacaagcaagcccacaacggcccgatattccaccacacctctccctcatattagctcacagaggcgcaaggtgaagcatgctcccactaccctattaaatgggctcaccccgacaagcagcacttgtcggggcgagcctatgatttagcggtctgagaccgaaagcttagaggttcacagagcgaacaaccagcgtcgtcatcacaccactgacagcgattccattggccgctatgagctcgactccaagcgtcacggtaccagcagccttatcatagcgagccgagttgatagcaaagcgtgcatcctcgaggtagatatcacgggtatcatgcccgccagagagcacacctctcaagtgatcaccatcccaatgcaattcaccgccgtaggtattctggatacctggactggcgagcttgatccagtagttagcattatcctgtaccagctgcaggacgacagcatccgtgatcgtcttactcttctgaatcttcttcagtcgatctctcatgcgctcattgagctctcctgaggtaacgaaagtaagctgcctctggagtgctgagaggggcttgaaacccttggcctcaaagtcaagtaccacgacagggtcctccatgcccgtacctacgagatgtaccaaaccacggaacgaaaggtaattattcgagtggtctgcacgcgcatccgtcaggacgacagcatacttcttacgatcataccccttcaggatctcccctgcacttgctgggaagagatgagcaatcccaccgaggtagtactgcggagcaaagtccttattcacctcgaacttctgcatgaagtagtcacggcgagagacggggatacgcaggacagacgtccccgagatgtgattgtatcggaccttgcaggcgatgtaatcattataagagccatgctcttcatacttcatatccaccagctccagcagcttcagatcttccgaggtaagcgtatagggctctccatcgaggtcggaggccttgaaggtcacgaagggaagtaggtcttccagcttgatggcatccttattaccacgccaagcgaagtcttcgatcttcagcttactcagcatctctctcgtcttctcctggataggctctacgaccatacgcgtagcgatgtgatagtccgaaggcttaggcaccgagggcatgggctctgcggacgataccggaggcgtaggctcgggagtgggttggggcatatcctccttacagctcgtaacaaagccgagcgtaaggagcatggagaaaagaagtatcttctttgtcatacgcaaataaagaatcaaatgggtagacgtataaacgacgatagggtgacgaagcttgcactccatcaccctatctcttaaaatggcggctacctactctcccacgaaacgcagtaccatcggcacgattgggcttaacttctctgttcggaatgggaagaggtggaaccccaacgttataaccacctaaatatctctgtatt

SEQ ID NO: 79 - DNA, 21380 bp, Porphyromonas bobii
  source 1..21380: mol_type = genomic DNA
acccaaatgtaacgcttcgttttgcaggaacacttgcctatcgtctccacgaacgtcccgacaatcagcgatttaaggggtattgatcggaggtatcattatgtacgcttcgttctaccccccttacatctttgccagatacatctcttggcgtagggtgctcgaggggcagtgctgcatgaagggaaagtagctgggggcggagagggtgaagagccagccttcgctcttaccctccttctctgccagctcgcgtgctacggcgagtgtcgagaggggaagcccttcgaccgcagcggcatcatcgacgaagaggcggaagcgctgctggtccttgaggttgttttgtccgaaggtgaggctcagctcgctcagctcacgcttgacctcgcgcagtcgctccttctcctcggctgggagctgggcaccgctctcgctgaagccttcgtagcagcgctggaggaggcgcaggtcttcggcatcgagctggaggctctcacgtgcctcccatacctggcgtatacgctcgaagaggggttcggagagggtgatgaaggaggagagtgctgatagctcagggctaacctcctgactgatctgcatcagttcgtccgtagcctcagcgtgtaggaggttgtagaagctacctgatacccactcgaggagggcaccggagcgctcgagagcaaggatggtattggcgaaggtgggggcttcgggtgaggcgatgatcgcctctacctcacggcgcttctcttcgatagccagatggaaggcctcgcggaagtcctctgtcttgaattggtcgaaggcataggctccgtgagggagctggctgggctgacaaatactattcatgtcgtcagtgatacacgggagggtgaaaagaaagctacctgccttcgtcgcagccacgcgaaggggcaggcgaaggcaggtagccgtatggtgtatccctccagcggaaggccgcaggggtaggatacgtagggatcgacgtcttagaggcggtcgttagagccgaggacgttgatgatcttgtgttcgtagagcttcttgagagactcacgagctggaccaaggtacttacgtgggtcgaattcagcagggttttctgcgaagaccttacgtacagcagcggtcatagcgagacggccgtcagagtcgatgttgatcttgcagacagcgctcttagaagcctgacggagctgctcttcggggataccgacagcatccttgagagcaccaccgaacttgttgatcgtagcgacttcgtcctgaggtacgctggaagaaccgtggagtacgatggggaagccagggatctgcttttcgatctcagcgaggatatcgaagcggagggggggaggtacaaggatgccgttagcatcgcggtggcactgctcaggcgtgaacttgttagcaccgtgtgacgtaccgatagagatagcgagtgagtcaacacccgtcttgctgacgaagtcaacaacttcttcgggctcggtgtaggtgtggtgctcagctacgacatcgtcttcgataccagcgaggacaccgagttcaccttcgaccgtcacgtcaaactggtgagcgtactcaacgacagagcgtgtcagagcgacgttctcgtcgtaggggaggtgcgaaccgtcgatcatcacagaggagaagcccatttcgatgcagctcttgcagagctcgaggctatcaccgtggtcgaggtgaagggcgatctgaggattggggcagcccagttccttagcgtattctacagcaccctgagccatgtagcgcaggagcgtctggttagcgtacttacgtgcgccgctggatacctgaaggatgacgggagacttggtctctactgcagcgctgatgatagcctgcagctgctccatgttattgaagttgaaagcggggatagcatagccacccttgatagcctttgcgaacatatcgcgggtgttcacaagacccagttctttgtaactaaccattactgttcctatttatagttgatacgtttatcgttctatgcaacaaagataagggaaatatatgtaaaacggttagatatacttaaatttttcaggaagttgaggctgctcctctcccctcataaagcttgtatcttggggatggtgctgactattggggcattcatctcctgatttaccccctgctcccacccgctatttatttcactttgatgcgtttgcggggatggaaatgtgagggcgtataaagcacggagagccgactctactcggtagaattggctctcttatttagcctcagccactgccttagcttgcatagaagttagggttcttttcatataccctactacgggagaatagtagcacctcatataggagggaaagacaacctatattggtcgccgggctgaccaatactgcttcgcttcgtgacctatataggttcgcccagtgaccaatatgagactgttgccgcgagtcctgccctctatttattgtgctaaggcatcgtatgtccagctcaacgatatgcccctccgaagagatacacaagctcttcgctttatcgcgagtattcttctgatccagtggaggaaaaagtgtccttctcgtaaaggaaaaagcaccttcccgtagtggttttcttctatctacgcacgtagttttaaagaccaggcacgtcagtccaaatatccacgtacgtagatattagatccacgtacgtagtccaaacttatctgccactcgtccacaacttttattcctacgtggagcaatggtctcaatatagcttggcttcgtgacctatataggttcgcccaagggctcgtagtgggagcttatccataggcataaggaagggtgagatatcccgtgaagcccttatctttgctcaggtggatttagggggatgccccgtgccactactctcgtatgtcctgacttcactcttattcaaatagactatcatgaagagaacattcagcctactcttagcgctcatgacgctgaccttggcctcgagctcctgctccttcttccgctccgctgggatgcagagccgtcgccacgtgctacccgaccagcgcattagtattgaggaggtgtatagctcgcgcgatcacctcggtatctatggtcgcctgtaccgtcctgtcggagtcaagggtcgcctaccgctcgtcatcctcagccatggcttcggcgtgacgcaccgtgatggtgagggctatgccgaactcctgacacgcatgggctacctctgctataccttcgacttcaacggtggtgggcgtgagagcctgagtgctggtgcgacgacagatatgtccgtcctcaccgagcaagcggacctcaatgcggtcatcaatcagctcaagcgccgctccgacgttgatccccgatatatcaccctcttgggcttgagccagggagggctggtctccgccctcactgcggcatcgcgccccgatgatatcgcttcgcttatcttgatttatcccgccttcagcatccctgagatggtgcgtaagcagtggggtgagtatcggaagatccctctggcaaacaccctctggggtatgcgtctcggggagaagtactacaaagatgtgtggaatatcgacccctatgccgtcatcgggcgcttccaaggccctgtgctgatcctccatggggataaagatcgtatcgtagagcagtccgtctcggatcgtgcagccaccatctacaagaatgccgagtaccacgtgatcccaggtggcgaacacggcttctcgggcgaggccttccagcaggtcaagcgctacatccagaccttcatgaagcgatagctacggcgaacctttcctgatagaaaaagctccgccccgaccgtccacatagagaggacgatcggggcggagctctttgatgaggagtgcttgtgcgggctaaagattgtagctgagcccgacagcgaaggccatgaggtcggggtagcctgggacgaaggtcgtcgctatgtcgagcttggggctgagagcatacttatactccagctcgcctccgtaccagaggaacttacgctgccacttgtccgtggggctaccctcgaagtacttcgtgtcgacgtaccctggcaggcggtaccagttgcgtcggtagatccatgtcggtccgataccgccgtagaggcgatgccgcccgatgtggaagatacgagcacgtaggccgatactcgtcacaccagcgagctgggcggtgcagtcagcataaagcccttggatacccttgacggagaggatctcggggatgatgaaatactcgtaggagagtagggcgcccagatcaactacgaagtaagcctcggggtccaggcggtttggcatcagcttggcattgggtctcccgctcagaggatggaagctgaggcccatgaacttcaggctgatgttttgacggctctgcccttgtaagggtagtgagcagaggatgagcccaatgagggcgtataggaaatggtgtgtacgcatagatggagtgtgtgtaataaaaaagcatagcgccagcttctacatagagcaaagggattgctgtcggagaagctggcgctacatgcttaggaggagtggtgctccttagcgtcggggcttgggacccatgacgatggtgagcttgctattgggatggatatccttgtgcgtgaaggtgaggctttccgtgatgtcacgtccgttgatcgtggcttgctgcacgtacttattctccttgctattgttacgcacctcgatagtgaagatgcccttggggagctggatcttcgccatatctacgagcggacggccgatggtgtactcggccttacctgggcagacctgatagaagcccagcgcgctgaggacgtaccaagctgacatctgaccgcagtcttcgttgccaatgatacccgcaggcgtaggcttgtagaagtggcgcaggacggtatcgaggatcgcctgacccttgtgaggtgcagcggtgtagttgtagaggtaggcgatgtggtggctgggctcattgccgtgcgcatactgcccgatgaggcctgtgatgtcccccgactgctcagctccatcgatacgtgaggacgtggtgaagagggtatcgaggttgcgctccagcacctcacgaccacccatgagcttgaggaagccctccatatcgtggggagcgtagaagctccactggtaggcgttgccctcggtatagtcgctcttctcatgagcggagaagcgggggttgaagggcgtcaggaacgagccatcacccttgacggggcgcatgaggttcgtctcacggtcccagtagcggcggtagtagagtccgcgctggtcgtaagccttagctacggagtcgaggccagcagcctcagcgatacgggcgatacaccagtcatcgtaagccatctccacaccccagctgacgctctcggggacggagtcgcagggtaggaagccgtagcgctccttgtagtaaggatggcgcgtgatgaggtcgagctcacgcgtaccagcgaacttctccgccagatcagcgcgatagatcgagctgcgctgtgcagcttccgtccagtgacgcaggtcttcgcttgtagccagacccttagcgacgaggtcggcgaggatgctcaccgagtggtaggcaggcatacagcccgtatagtttgaggcgagtggccagcgtgggaggatcgtcccttcgtcatagtcgctgacgaggctcttgccatagcgcagtgcctgatcggggtcgatgatagtgagcagaggatgcagcgcacgataggtatcccagatagagaagacggtgtagtgaccttcttcggggcggggattcttatggatagccttgtccataccacggaagctgccatcgacatcctgatagttgaagggggcgatatgcgagtggtagagtgcggtgtagaagttcttgagcactgctgtgtcagaggtctcgatgcggatcttgccgaggagatcagcccagatgcggcggctctcggtgcgtacagcctcgaagtcccagtgggggagctctgcctgcatattgcgctcagccccctcgggagagacggccgagagaccgaccttcacgaggtagggcgtgctccccttggggaggtagaggtggagcttcaggtcagccgtgtcacgctcgacggcgaagcctgcgctgagtcgctgacgctcaccatcacggtagagggcgatgctatcggcaggcgtggagaggcggaggatgtagctcatctgatgatgctctgcccagcccttggtgtagtaggtaccgacgatcgtcgagtcattgacgaggcggaagtcattccccacgaccttgtgtccccagttgggctggaggatatgaccgagatccaggaggagcttgcggtccgtgctgtcagcataggtggcgcgtaggagcccgacgcggtcggtggaggtcagctcggtctggataccgaagttcttcagacgtaccgagtagtagccaggggaagcggcttcctcggtcttgtcgaactgagctatggggcgcagcgtgtcagctccgctatagggaaggatcgctacatcgccgaggtcaccaatacccgtccctgagaggtgggtgaggctgaaggcatagatgacgctgtcggactcatggtagccactgctggcatcccatccgatgaggtgggtgtcggggctgaactgcaccatcgcgttggggcgtgtagcccctgggaaggtgtgtccgtgctcacccgtaccgatgaacggatcgacgaaactcagaagatcctcgctggaactactgcccgtagtcttcgaggagcaggccggcaggaagaaggcagccgcaaggagggctgctgaggacgcggcaagcgacctcagtgaatggggtaatagatgcatgagatagggtgagatagatacttagctttggctggcgaaggctgcagcgaagagacgcatctgacggagcatcgagacgagcccgttcgagcgtgtaggggagaggtgctcggagagacctatctccttgatgaagtacaagtcggagtcgaggatgtcctgtggcttctgatcattgaggacacgcagcagaaggctgacgatgcccttaacgatgatcgcgtcgctctctccctggaagtgcacgtgctcaccgtcaaagtgggcggtgatccacacgcgactctggcacccctcgatgatattggtcggggtcttgtcgctctcggggagtggctctaaggtattgccgaggtcgatgatgagcgcatagcggtccatccaatcgtccaaggcagagaattcttctatgatctcgtcttgtagttcgttgattgtaggcatggagtgtgggtgaagtgattagatgtcctctcggatcgtggtggctacggtctcgccgacagcacgcagggtctctatgtggatgacgttcatattgtctgctgaggtgtgccaatgagccccaaagcccgtggctctattggggtcgaagttgatgatgtccacgcaagggataccacgatagcggatcacggggccgtggtcatcggtcatctgtccgccattagcctggacgaagtagtcgccccagccaagctgggcagcagtctgccagagggcggagagtagggggcgggcatattctcgtgagagaccctcccagtagaagcgggcaccttgggagccgaccatgtcgaggaggatgccccacttagccttgtagtcactctggtgggggtgctgtgcccagtattgtgagccgaggcaccagctgtcttcgtcttcgctctgaccaccatcttcgaggtcaaagaagatgaagtccagagccttccccgagggatttaggctctcttgacgagcaagctcaagcaagacggcgacaccgctggctccgtcatcagctccctgaatgggttcgccctgacgctgtacgacagggtcgtggtcagctacttggcgggtatcccagtgagccataagaaggatgcggtccgtaccctcgggagtgcgggtggcgatgatatttgttcccgctgcctgcttgccaaagtgatccttcccctcgaagcgctgtagggtcacttcgtaaccccactgacgtagcttctgctctatccaggctgctgtcgcacgatgtccttcactgccaggagtgcggacaccaaaagctacttgctgctgtatgtactggtaggcagagtcagcactgaagggagcagcggtacgtctctcggcgctttcgctgcccgtgctgtcggcactctgtgcttggctcttcgtgccaccgcagctgatgagaactgcgctgaggcctacactgagtagatagagaaggggggacttaggcataatcttcttgctctggggtgagggggggatatgagatggccttagaagaccgagggcttgttgggctcgatgatgatttcgctcaaggggcgcttgggtacgtgatgacgcccttcttcgtcgcgccagtagcggacatcctcggggctacgtgcttcctcgaggatgacctcttcggctggcttaccgatagcgacgatcgcattgatagataggtgcgtggggagatccaggcggcgtgtgatctcacccttgccgtgaccagcgaagatacagacgccatagcccgcatctgtagtcagcaggcccagtgtctggagttggataccttcgtcaaagcgagcagcaggagcaatatcggtgtcaatgagctggagaaggtaggcacgagggcgctcacctactgcgggcccatcccactcggggagcatagcagcccagtgctggagctctgtgatctcgtgacagagggcttcgtccgtgatgatgatatacttcagtggctggacattgcgtgatgatggcgtctggcggacgacgtccagccagcggaggatctgcaggcggtcaatggctaccgactcgtcaaagcggcggtaggtgcgatccttcttgataagagtctcgatgagcgaagacatagatagtggagatttagtattcgggtagtgcgaagagccggcgtgcattctcgctggtcttcgtgatcagtgtatcgtcagtcagctcgtagcagctggctacgaagcttgccgtgtggggaaggaaggctggctcattgcgcttgcctcgcttggggacaggcgcaagatagggagcatcagtctccagtaagaggcgctccagggggatggaggcgacgtactccttgagcgtgctgttcttaaacgtcacgacgccattgatcccgacgcagaaggaggagaaggatagtgcctcctcgagctcctctcgtgtgccagtgaagctgtggaagactccacgaagctgcgggagattgactcgacgtagcgtatcgaaagcatcagcaaaggcctcgcggatatggaggatcacggggatatcaagcttaaccgcccagtggagctggcgctcgaaggcttcaatctgctcccgctgataggtcgtatcccaatagtaatccagcccgatctcgccgatagatacgtgagggcgctgcgagagctcccgctccatatagtcaagctgggaggtgtagtcctccttgacataggttgggtgcaggccaatggtggggaaaagtcgctcgggatgtgccgcgcaaagctcaaggacgcgaggatagctcgctgcgtcgacattgggtaggaccatctgccctacacctgccgcagcagcgcgtgcgagcatctcgtcacggtcctcgtcgaactcctctccgtatatatgtgtgtggctgtcgatgagctgcatgctacttggtgcgaccggagagggtatggaagagggcgagaaggagctcgcgcccttcttctctgaggggaagctgctcgactccgcgataggcttcggtagtgaggcgctcgatctctgcctcggcatagaggcgtgtgcctgccttgtcgtagagtgcgcgtacctcatcgatgtaggctcggcgctcctcgggagtgtaggtcaagatctcttgcagacgcttgagatcttcgccctgtagctgctctaatgtatataggagaaggagggtcttcttagcattgacgatgtcaccaccgataggcttaccgaaggtcttctcatcgccatagacgtccagtaggtcgtcttggatctggaaggccagtcccagctggatccccacggcgtagagtgcgcgagcttgctctgcagtcgcgcctccgacgagtgcgcccagctccaatgatgagccgagcagtacggaggtcttcaggcggatcatctccatatactcctcgacgcggacctcggagcgagtctcgaactccatgtcatactgctgcccgacgcatacctcgagggccatctggctgaaacgagggaggagctcggcaagtagggacttgtctgcgatctctgcaagagatgcataggcctcgatactcatcgcatcacccgataagatcgccgtgttgtcaccccagcgacgatagaccgtctcttgcccacggcgaagtggagagcggtccatgaggtcgtcatgaaggagtgtgaagttgtggaagatctcaagagctacagctacggggagggcacgctgccaggcttcggtaaaggcggcagctgcagcgcaggccaagagtgggcggatgcgcttgcctccgaggcgcagggtgtagtcgatgggggcaaagagcccttcgggagagcgagtgccaagggagcgggctgcgagctgctcctctacggcctcacggatgagcttgagcttcttctgttggtcagggtacattgtcataagacgctattgtcggcgatgtgccttttacaaagatacgacttagccagcgaataagccccatcgctgagtctggagcaaaaggaactcgggcagatgctccattgaggagagcatctgcccgagctgtatgtgtcgtctccgtgaggagagcgatagatcttactgcagagagaagacgatagggatgacgtagcgcgtacgtacagccttaccctgctgcttaccaggcttccactttgggatggacttgaccacgcggacagcttccttgtcgagtgcggggtctacacccttatagacttctacagcggtagcagagccgtcacgctctacaacgaagcggacgatgaccttaccctggatacctgcatcctgtgcactctctgggtagtggaggtgatcctgcagatacttacggaaggcattcataccaccggggaactcaggctgctcttctacgacttcgaagggctcatcagagagttcttcagtaggcgtgcctgggacgtccttggggccgaaggggatgttgacgggaggaagatccttaccttcatcggcagagacgaaggtgggcttttcgaccttgacgttgttgtccacgaccttgaattcctgaggtagctggatctcggtctgctggggctgctcctgtggcttaggctcttcaggcttatcctcaggctgctcttccttgacgaggagcgcttcttccatttcggtcttgtggccagccccatcaaggttgcctgcttgggcaacagagctacgccactccaagcttacgaaggtcagggagagtgctacgacgagacccagtaggagcgagagccccttgcccttctcgaggtcagcttctggtgacttcttgatttccataccgtttacactgtatctttagtggttgatgttgatcctgtacgttgcgtacacttgttttcttgaccacaaatatacgaatatattcgtctacatactatatgtaggcaaaagatttatctgcgagcttcgtctgaggagtggtgaatgctcgttgaggagggataagtactcctatttttataggtatagcgcccccgtagcaagaggactacgggggcgctatcacttagagaatggcccgatgagagcctatgggattcagctacttgatcagcgggttgttggtcgtttcgttctgaggaatttcatagacgaggcgagagtcatcccacttgatggcctcttccttgaagaagagactgcgagccgagcgcttgttgtcgtacttgaagcgcttgatcaccgtcagggcaaggccttcgccccacatctcgacgcgccagttgtagaagatcttttccagcagctcatcgtggttgagatccgtgatagcggtctctacagcggagtacttatcagcagcggtacgctccttgaggagcttcagcaggatggtctttgcagaggcatcatcaccattgcgagcggcagcttcggaagcgatgaggtagatctcagccatacgcatgaagacgatgtcgctcagccacgtgcggtctgccatcgtaccgatgggcttacccgtagcggagaagaacttgttccagggtatcccactcttggggtggaaccaattcttacgcaggtcgtactcggggatctgatcctggaggtacttgttgatacccttgcgggcaccgacggcagcatagctataggtgtagatatccatgtgcccccagaagcttctcagtgagcctgtgatatcctctgtgatatcgatagcccagatgaattcaggagtcttatagttgttgaagccgttggtcgtcagctcgctggccgggatgagggggtagttggcggcttgattcgtgatcacgtcattggctacggcgtaagcttcgctccacttccccatgtccatgtaggcacgagccagagcgcccttagctactgtctggtcgatgtactggcggtcagctcgcttcatgccagagacgtccattgcggcgataccctcagtaaggtccttgacgatctgggtatagacctcttcgatggtagcgagcttctgtggcttgctggcatcgtcggtagcagcatagatgggcactacggtgaggctctttgtatcggttgcatagggcttgccgtagaagtgcaccaggttgagataggctaaggcgcgaagcgtcttcacctgcccccagtcaaagatgtccttcattcttttggccttcagattcggctccgtcgtcacttcgggaggcgtcgtgtcacccgtgcttgagcggaagaaactattggccattgatatcgtgcggtagctgatacgccagacggcatagttgaggctcccatctcgcttatatgagagtaggcgtgctgcctcttggaaccatccatagcccagccccccttgcagctccatatcgccagacatgaggtcagagctgatatcgaaggccttctgtgcgaagtcatcgtgacggctggaggattgcccattcttgaagaaggtactgaggataccattgatgtacccctcgttgataccatcattccactggctggccttcttgagctgatcggccgtgaatagctgggagggatcttgctcgaggaagtccttcttacaagccgagagagcgaccagggcaagtgcagcccctacgaaggttcttatacttgtacgcatagtatataggtgtataagaggtgagacgaattagaagctgatgcgtgcccctgcgacgaaggtcgatacaggcaggtagcggttcgtacctgagcccccactgaggctggtcatagcagcgtagcccttacgagcggagatgaggaagaggttgtcaccactgacgtagacggaggcactgttgaggccgaggtgcttcatcaggctcttgggcaggtcgtagctgatacgagcattgctgagcgtgaggaaggagcggctcgtgaggaagcgcgtagaggtcgagttagcgaacttaactgcttccacgttgtgcgtgaggatgggcagatccgtgtgcttgtccgtgctccagtagttgcggatatccttgtgccagttgcgcgtgccgatgacgctaccgctgctcatcaggccagcgtagacaccgtcatagccccaaccgccgaggccgtagctgaagttcgtcgagatgctgacgttcttgatctgtacatcgaagccgaagccaccgacgaagtcagggatagcgctcttgccgacgaattcgttgacagccttgttgtagtccgaagtcgtcgtctcggtgagtgccttagcgtcaccacccgtgctgatgtacttttcgtagtcggtgacgtaggcatcattgccactggcatccttgtaggtgtaggccttccacataggcagcccttcattgctgacacccttccagataggcatatagtagtcgagtacggagtgacccttcttgtaagcatagttgccctggagctcgtagtgcttgggtacgccgaaggggtcgacgggcatgatgagcatcttattcttgtagtagccaccgttagcgcggacgttcacagagatgtccttgctcttgtaggcctcccagttaagctcgacttcaagcccgttgttgcgcaggcgaccttcgctcacagggtagtaggcatagccaagagaaggagcgacttgcttcttgaagagcatgttgtccgtcgtcttgacgaagtagtcgacgttgagctcgagagcgttgaagaggcgagactcgaagcccacgttgaaggtgccagagcgctcccactgcagggcactgttacccttggcgtagaaggagaacgagggagagttattgaagttgtctacttcgtagaagtcgtggtagaggtagtagttaggagtagtgctaccgtaggcgaggttcagggactggttccccaggacaccatagctggccttgagcttgaggttgttgatccacttgacaggagagaggaacttttccttgctgatgatccaagcagcacctaccgagccgaaggtaccccaacggtagtcgggagcgaagcgagaagagccatctcggcggactgaggtgctcaggtagtacttgttctgatagtcgtagcgagcttgaccgaagtaactttcgatagcgtaggtcaggcggtagccagagatatcaccacggatgagaccgtcatcgagggtggttacgttcccgaggatgagcttcttcttgcccgagtagtggaagtcgagctcgttctttgtggcttcgtgagcgatgaaggcatctacggtgtggtcaccgaaggtcttgccccaagagaggatctcattgagcgtccagctgaagtcgttctcattcgtgttggagatacggccgatcttcgcagcatccccgtagtaggggttagccagcgtttcgttcttggaggctgtagactggaagccgtaggtgacggcgagtttgaagtccttgaggaagcgatactcgaggttgaggttccccgtagtgaggttcgtgaggtcttcgtcgcggtcgaggcggacagcaccagcagggttgataccaccagcataggcacggctaccgtcggaagtctgaccgtagtcgtagctcttgccaccagggatcttggggtcattgacgaggttcccgttttcgtcgtgctcgaagacagggtagatcgcagggatctggttgacgaactggaagccgttgttggagttgctcccctggcctgggctcttagcgagtgagcgagagtaggcgaggccgaggctcaccttgaagtccttagtggggcgaacggtgacgttgttacgtaggttcaggcgattgaattcggagctgatgtagtacccgatgttgtcctgataccccagtgaagaggagaagttgaccttctcagagccacctgatacgcgtacattcgtttccgtgatgcgaccagtacggaagatgtgatcacgccaagactcgggcgtgtagaggcgcttgtagctgttgttgaacttgcccgtgttcacatcgatcatctgacctgagccagccttccagagattgtagtggtcccagataccagtagcatcttcgccacctgcgaggatcccagggaagaagagcaggtcggctgcgttctttggtgcatcagcgatggtcttgccatcggcgaacttagccttggggttgttgtagagctgggtgagcttatccttgaggccgaagcgttcgtaggtgttcttcatggcctcgtaggctacctccatatattcttcaggagagtcgatgacatcgtactgggggagatagcggacgttgatcccactcttgatctcggcgtcgaaggagagacgaccagccttaccctgcttcgtggtaatgaggacgaccccgttagcagcgcgtgccccgtagagtgcggtagccgaagcgtccttgaggaccgtgaggttctcgacgtcggccatgttgaagccgctgaggaggctggtgtagggtaccccgtcgatgacgtagagaggtgacgtgctggagttcacagagccgataccacggatctgtaccgtagcggctgcaccaggctgaccgctggtcgtgaagacctggaccccaggagaagccccttcgagagccgaggtgatattagatcccgtcttcttcgttaggctggcgacgtcgatacgagccgctgaccccgtgaaggagttcttagtctgcgtgccataggcgacgacgacgaccttatcgatcgacttttcctcattctttagggtgatcttgagctcttgccccgtgatggcaacggtttgggtgaggtagccaatgctggagaccttgagggtcttagcctcggcagggagacggagcgtgaacttcccgttgacgtcggtcaagaccccgtgggaggggaactcgacgcaggtcacggatgcggcgaccacgggctccttgtcatctgcagcgatgacgacaccggtgacggtgacttgctttttctgagcccacgctactccaatagaaatgcagaggagtaggacgaagagtaaactctttctcattagacttgtggtgattagggtgaaacggatgttagactgctgtggggaagtgtgacccttgggtgatgattcctcggtcgtcatctcgctgtggtaaagatgtgacgtgtgatatttgatgtgtgtgccactgcgagatgaggagctctgttgaggagcatgcggccgcttgccacaagcattcctgcggtctggtggtagtgcagtctgtcgatgtgagggtaggtggtactcgtatctccctcgttccatggcagtctgtgtgctatacccagactctatgagcaaaggtagcaatctttcttttctaagcaagtccgctggtaaataccttctttcataggtgctatgcttctcttttatagccttttaattatctgtaagatggtgcgttcccatacggatacttacttaatttctttatgtagggtgcgtatatgctaccgcacgtcgcgctacttctggcacgtgtatgagaagtctttgtgttgagtagtaccgaggataagtaggaggagagtccctgccgaatgtctgctatcagatcattcggctggggctctcccttatgttgctatggtatagtggtgtagactactcctttgcctaataaggcaaggaggccgtgtgctgtctacctctatccgtagctacttattgctcttgcggcggttgcagtctcggcaaagcatctgtagattctctatctcggtcttcccgcccttgctccaaggcttgatgtggtcgccctccatctcctcgtacttgtacttcttcccacagcaggtgcagatcccgccctgctgctcgtagacggtgcgcttttggctgtcgctgaaggctcggatgccgagcacgctcgggtcgtcgttcccgatcgccttctccaagacgtacttatagatgccactcttcttagtcacatcatcatcagccatcagggtggcaacctccttctccagtgctattgggttgtaggtgttcttgtggtatctattgtagtagatcccccagggaagccctttcatctccttgcgatagatggggaagagcagctcgacccattcgatgccacgtcggaaataatcccaaaggtcttgggcattaggattcagctggtgcttcatcatgcactcctcgatgctttgcttggggttctctcggtcaccataccaatagatcacggtctccaggtagtcctgtcggttagctgttcccttgaggtacttgctcccaagcccgtaagcggcacagcccgtcttgctgaagtagcgcttcgcatctgatacccagggtcctgtatagaccgcattacgtagctcttggtcggtaagctcttcgcctgcgatattgatggtcttgaaccactcgagcttctcactctctgtcccatcgcagatatagacggtgagctcgtagtcgaggagttgcgcctggaggttcgtaggaagcgtgtggaatgcctgaggctgcttgatgccaaagagtccagcacaggagaagtccccatcgaggaaggtgcagatagatagcgtcctttgctggccatctatgagctcatagtgcccattcccatgatcagcccagtacataacgtttagcggatagcccttgctaagggtatcgatgaccgcttgctgttgctcgggcttatagacgaattcgcgctggtaggcagggcgcacatccagcttgcctccataggcgacgacacccttgtcgccgttgtcttgatatccgttgaatagatcacggactttaatgtgtacgagttgaatgttcataagctcttgctatttgcgtttacggataagtatgcgtgcgtatacgattcgcccttctacactcccatccttatctttaattaggccatggggcttttggggagctctattcccgatgataaagtcattcgcgtcgagtatctcgaactgatcggggttgtgcttatccaggtaggtaatgggtactcccattactccgtcatagtcacagggaatatcagcggtcttatttacgttgatcgcatcgtagttatcgtagtgggggtattcctctggcctatacttcttgtgaaggataagtgcctggtgacgttggggaaagtctaagttggtaaaccaacgtacacccttcatgcgtatgaattttcgcccgtcaccatctatgcgggaactcgcagcttccagggggtaactgcttggtatctcaaactcacggtctccgctatgaatgcttggccctagccagatctgctcactctgtacgaaagggaagatctccttataggtgacggcatttatattaccgatgatgataaacttcttctggtattcgatcagctgagcgatgtattcacggaagagagagaagggaggattggtgacgacgatatctgcttctttgaggaactcgatacactcttcactgcggaagtccccatcccctttcagcggatgcacgagtccagcgatattcgggttaggtggcatgccgatatcttctccctcgtagacgaggtagaccgcctgctcggtcgcactgacagagaagagatctggattttgattcttgtagcaggtcgtgatgagcttcttgagaccgaggtgatggaagtttaggacgaagtagtagaagaagttgctcatcctaggatcgtcacagttgcagagcaccgtcttgcctgcgaagtgtcctcgatagtgcttgagctcagcgtcgatgtccgccagctgggtgtagaattcatccttcttccccttcttggcttgagagagttggttgtttgccataagcgcatagcataattgggcgctggctatctctcgggtgggctactcagggcttgggtacaaagagaagcgtagacgcgcctctctccgtaccttcaggccctaggaatagcccacgtcacaagagataagtcacgcctacgctatgcgcaggcgttcactgacttattcgagcgacgtagcttagaatttcctaggttcgaaggtactttccgaataaatagcaaacgctatgttagtactaaagatggagtgctattggcagacgcttctgcccgactccaagtgcaaaggtatggataatcggatacctccgcaatggtaggaagactgcatcggagtgtgaggagtaggtgtgtgcgctactgcttttcctctggactttccttgcttaagtgaaggcgtataaatcatgcttcgcgaggaggtgaagtgaagcaatagttgtttgtgtctgcttcaatagttgtttggggtacaaacgaatagttattcgcatacgaaacgaatagttgtttgcacctcaaaccaatagtcgttcgtgtgcagaccaatagttgtttgtgaatagatctattgagcttcatccgtgacccctataatgacaaggcgcattagttgggtagggaagaggtctcttataggggccttttcgagaccttcgtatagagggtgatgtgaacctatattggtcgctgggttgacctatataggtcgcatcaacaacctatataggttcgcgcgacgacctatataggtcaacccagcgaccaatataggttgatattatgtccttctatgaggctctggtgaggtatcgcagtcggagcttctgtcgtatgcggatggtgtgggagagggactaatgctcagccctcctcctataacatataatgtacgcgcgcaaggtggagtgcttgcgtggagaagtaagtgtgcggggttcgtaataggtatatgagtacgtgggtagagctctataggatggcgaagaaagctatatagctttgtgaagcgacctctatttaggttgttgctctgcgtaggggtaaaagttgtggacgagtggcagaaatgtttggactacgtacgtagctctaatatctacgtacgtggatatttggactgacgtacctggtctttaagactacgtacatagacagaagaaaaccactacgtaatggcgcttttttcttcacgagaaggatacttttccatccgctggataagaggaatatgcgcgataaagcgaagggcttgcctgatctcttcggagaggcatatcggggagctgggcgcacgatgctttagcacactaaatagagtgcgggactctatgcaacagtcactatttggaagtacgggtattattgccgtatctttgcagtcgcaagtcaggcggacgagcggcgaatgacagggtttagatcgagagtggtaacgaaaaagtttcgctcaagatttggtggagtgaaaactttgctttacctttgcactcgcaaaagaaacgaacggcctagcggcgacgcgggtagtttgacttcgagagatctttgagataattgatattgacaaacagaagtgtagtaacaaacgtttagggaaaagaagacctaaccgtcaattacgacctttacttaggtagagatacactaataaatctgaagcaagaatcatttttagagcaagacaaacagaacaaagtacaataaaaatattgacaatgaagagttt

SEQ ID NO: 80 - DNA, 7350 bp, Porphyromonas bobii
  source 1..7350: mol_type = genomic DNA
cccttatagaataaacctttgcaggagagcaaaatcaaccagtactggttcgcaagttgaccagtactggtcagagctcgaaccagtactggtcaataaggtgtaccagtactggttcactcagcgaccagtactggtacatctgaggagtatgaggaggccactgaatccgtctaagaagtgataggatgatcatgtggtggccttccactatttttgcaggcgaaggagatggcaggagaggggccaacttcaacctctcacccctcccccctatacattatatataatggacaagatccctactccgcatataggactaacctcagagcaggcacacaagagccggctacaacacggcagcaatgagctgacaccccgcccacgcacctcgcgctggaagcttttcctcgagaaattcgaggatcccatcatcatcatcctgctcatcgccatggtcctttccctcctctcggcctgctatgagtattttgtcaccaagactgatcccacaggagctggattctttgagcctgtcggagtcttcttagcgatcctactttccactggcatagctttctatttcgagctgaagagcgagaaggagttcgagcttctgagccaggtaggcgacgaggtgtgctacaaggtcatgcgcgatggcgagatcatacagatcccaaagcgcgagatcgtcgtcggcgaccggctctatttggagacgggggaggagatcccagccgatgccgagctccttgaggctgtcacactctcggtagatgagtcaaccctcacgggtgagccgatgacgaccaagagcgtacaccctgacgatcaagacagcgaagccacttaccctaccaattatatatgtcgtggcacgaccatcctcgagggacatgccgtctgccacgtgcaagtcgtcggagatgccaccgaacaggggaagatcttcgaagggatccagatagatgcctccgtagagactccactgaatcgtcagcttgatcacctcggcagtctcatagcccgtatcagctatatcctcgcggcgcttgtcctcgtaggtagcaccctgatctatgctcacgatgggggctttgcagctccatgggatgctacactctcctacttcctcggcaagatcatgctcgccgtgacagtcattgtcgtcgctgtccccgagggactaccaatgagtgtaagcctctcacttgcctatagtatgcgcagcatgatgcgtagcaacaacctcgtccgccgtatgcacgcctgcgagacgatgggagctatcaccgtcatctgcaccgacaagacggggacgctcacagagaatcggatgcgcgtcgagagcttcttcagcgaagcctccaccgaggaagaaagccttctccccgaagccatagcagccaacacgaccgccttcgtcaatgcacacgaccagcagcatcccgaggtcatgggtaatcctaccgaaggagccctcctgctttggatacgagagcaagcgtacgactacctcacccttcgtgactccacccctatcatccgacagctccccttcttgacagagcgcaagtacatggcaactttagtccagtccgcaatgctcgaagggaaggccatactctatgtcaagggggcaccagagattctgctcagcctatgtaatcttcctacggaggtacatacccgctacgaagcccaactgcatcagtatcagtcacgcgctatgcgaacgctcgctcttgcctaccgtatagtcgagagtccgacagagcaagagaagcctcttgatgagctgatccaagaaggactacagctacaaggcatcttcggcatcatggatcccgtgcgtagcgaagtgcccgcggctatccagcagtgccgaaaggctggtatcggcgtgaagatcatcacgggggatacctctggtacggctaaagagatcgcccgacagatcggtctctggggagaaagctctaccgacgatgaaatcatcacaggagcagactttgaggctctcacagacgacgaagctaaggcacgacttacccgtcttaagatcatggcacgcgcacgtcccatggacaaggagcgcctcgtacgcctgctccaagagttgggcgaagtcgtggccgtcaccggagatgggaccaacgatgccccagccctcaatagagcacatgtcgggctgtcaatgggcgacggtacggcggtagctaaggaagccagcgatatcaccatcctcgacagctcgtttgccagcatcgcgcaggccgtactatgggggcgctcactgtacctgaatatccagcgcttcatcctattccagatgacgatcaatgtcgtggcatgcctcaccgtccttataggagccttcctcggcaaggaatcgcccctcaccgtgacacagatgctctgggtgaacctcatcatggataccttcgcatcgctggcgctggcctccctgccccccagccctcatctcataaaggagcatccacgcaaggcctctgctgggatcatcacaccgcagctcgcacgacagatattcggagtcggtggcctgttcctccttctgctctttgctctacattatatattggagcacttggacctcacgacgggacagtgggtcgaagggaaggagcaactgacgtcactcgacctatccgtattcttcaccacctttgtctttcttcagctgtggaatatgttcaacgcaaaagcattccactcgggtcgcagtgcattcgctggcatggatcgagcgcgctacttcctactgatcacagctgtcatcctcgtagggcagttcttaattactacctttgcatacgatttcttccagatagctccactcccattcagctactggatcgcactcctcatagccactagcccagtactctggatcggtgagttggggcgtctcatcgcccgcctcactggacggcttcgtgcataagtcagcagattgcagttcctactccgatgatatgtagttcactccaccgccccctgtgtacccttctcttggggatagggcttctcgcctcctcttgtcagcagggcgagcagcggtctacccgactccagatagctacgacgatagcaccagcagctcaggtcatcacggagatcgctgatagcttggtcgcggtgacgacactactcccccaggggaataatccagagaattacgagcctacaccacaggccatccaagcactcacctccagcgctgcctacttctacatgggtgatctgggctttgagcgtagctgggtggagcgtattcatacgatgcagccagccctgcagctcgtacgtctcgatcaggatttggtagtgcctgcacatcaccacagcggtagctccactcatcttcatgacccacactactggacaagtgtacacgggcttcagtccatgggtaagagtatatacagctctctctgccgtattgatacgacgcaccgagctcagtatgatgcgggttaccagcgcttcacacagcgcctggagcacgtagagcggacgataaaagagcaactctccgatataccctcgcgtgccttcgtcatctaccatccgtccctctctgagtttgcagaggagtatggtctcaagcagctcatcatcgagcaagatggcaaggagcctacacctcagcatatacaagcactcatcgaagaagctaagaagctgggggtacgcgtggtcttcatccagcaggagtttgactccaagctcatcgagagcattgcgaaagagctcggtgcccgtatggtcgtcatcaacccgctgggaggagactgggaggagcaacttctactcatcactcgtgcactgagcgataccacctcatctagccctacacgatgacctcccctatgcaaccactcttagagctacgtgatgtgaccctcggctatcccgacaaggtcgtacttgagcacctcaactggtgcgtgcgtcgtggtgagcgctgggctatcacgggaccgaatggcagtggtaagaccaccctcatgcgcaccctgctagggctcatcccgctacaagctggacagctcctccgctacgaccgtgagggccatactaccgaccagctgatcgccagctaccttccacagatcaatcagattgatcgccacttccccatccacgtctacgaggttattgactctggcctccccaaaggcaccacggggcgcggtgtgcgtagagagcaggtagagacgctcgcagaagccatcgggctcacgcacctcctccagctgcccatcggcaagctcagcggtggtcaactccagcgagctctgctcggtcgtgcgctggcatctaatcccgagcttctgatcctcgacgagccactcagcttccttgacaagtcttataaggaaagcttcgagtcgctactggagcaagtcgtacgccccgagacgacaatgcttatggtcacccacgacctccaccaagccaagtccgagtactggcagacccttaccctcggacgcttcgaatagacttatgaataagaaagcctatccactcgctctactatccctcctcacggctctcccctctgaagcgcagagtgtagccgatacgctcagctacacggcgacaaccgcatatcgccccgacacgctgagcaatgcacagaaaacgaatcaactcctcctacagggggcgctcagtgcagcgtcactcgtaggtataggagtgatgcagaatattcacaacgagcagatacgcacgatacgctacgggcactaccctcacttccgccatcactacgatgactacctccaattcgccccgttagcagcccaacttggcctacgctttgcgggtgtagagggcacaagtaaatcaccctggcaggtgctcactgctgatgtcgctgctacggctacgatgctcgctgtcacctcggctattaagtacaccgcccgtgtaagacgccctgacggctcgtctcgaaactcctttccctctgggcatactgctatggcctttacctcagcgacgctactgagcttggagtatggcgagcgctatccatggcttcctcccgtaagctacggactcgcctccatcacggggctggggcgaatcctcaataaccgccactggatcggtgatgtcgtcacgggagctggacttggcatcctctcagggcacatcggctactggataagcgatcgcctcttcggtagcacaggacgtcaactgaagtactacaatgaggagcctactcctcacctccgtctctatgcccccattacgctaagcgctaccccttcgcagggtgaaggtacatggagcctccaggggcgacatgctgcgctgggcgtcgagtacactcccccacagtggcctctatatctaaaggggaatgtgggtctatctaccttccgtggtcaggagggaggcgatggtctgggacgcagtgctcaagaccgctacctatccctacgcttaggcctcgggcgtgacctacgcctatggcgagactttcacatctcggcatccgcctcggctgcacttcgcaagcacgtaggacgggctactacatttccagcccatgagcctgcgctgtatatgccagcgagctcggtaggtatgggtatcgaactggcgcctcgctggcgcttcacgaaggagcttggcctacgcctaccactcgggctggactactacccttcgtcctatcacctgactacccctcagcggacctacggactcagtcccgtctcgttctatgggggcacggcgctggaggtctacctctgatccctcctcgccctttactcacttaaaatcctattattcttatgagttggtattacctcatgcccgtgatctttgtcctagggatcatcggtattgctctggaggagcagatcaagatcaacaagaccgcgacggcgctccttacctccgtcgtcctctgggcgatcctcctcatcgacacggatatcgctgcagtgactgcaggcttccgtcagttcgtagcctccttccctcatgctccagcagaggacttaggcgtatcagactacctttcctttaagctcacagagcacctcggtgatgtctcgagcacgctcatcttcgtcctcagctcgatggtacttgtgaatacgatcgacacctacgggggcttcaagtccgtggctaagatcgtcgctacgacgaataagcgtgcgctgctgtggcgtgtagctatcgcctcgttcttcttctcggcgttcctcgacaacctcgctgccgcgatcgtcatcatcgctatcctgcgtcgtcttgtccccgacaccacggaccgaatgaagtatgcctgtatcagcatcatcgcctgtaatgcagggggctcttggtcgcctatcggtgacgtgacgaccctcttgctgtggaacaataatcgcatcacgccctactaccagatcttccacctcgtcatccctgccttcgtgaacatggtagtccccaccctcctggcgcactacttcctcttcaagaagaatgctcagctgcgtgccctaccagatgtccccgaagactcactggatgatatcctccctcagcacgcacgtatcatcgtcctcgtcctggggatcatctcgctgatgctcgtacctatctggcagaccttcttcgatgtacccgccttcatgggggttatctttggtctggtcatcgtgtggatctacactgagctgatgttcttccgcttcaagaagcgccttgagaatgcaactgagctccgtgtcacgagcctactcaatcgtgctgacctcactacgatcttctacttcctcggcatcctgatgtccgtagcagcactgatcgaaggcggacagctcgccgcagcctccactcgcgtcacagccctcattcccaatacgggtctactcgctgctatcatcgggatactctcctccatgctggacaacgttgcccttgtggccgctgtcctcggtatgtatccactggaaacatccggtgcgatcacgcccttcgtcgtcaatggctccttctgggtcttcctcgcctactgtgccgtcacgggtggcagcctgctgatcatcggttccgctactggggtcacagtcatgggtctcgaagggattagcttcggctactacttcaagcgcttcagtctgcttgctcttgctggttatatctctggggctgtagtctaccagctcatctcgctcatcttttagctcccatttgagctaaaaggcatagcgtacataagggagcgggtgaccttcttctctgagggaagaaggtcacccgctccctctttttttctatagcaccattatacat

SEQ ID NO: 81 - DNA, 2593 bp, Porphyromonas bobii
  source 1..2593: mol_type = genomic DNA
tggcaaaaactttcgggcaattagtactactcggctatgacgtcaccgcctttacacctgtagcctatcaaggtcatcgtctataaccacccttataatgagatctaatcttgaggcaagcttcgtacttagatgctttcagcacttatctcaaccgaacgtagctactcggcaatacgcctggcggcataaccgataaaccagcggttcgtccaacacggtcctctcgtactagtgtcaggccccctcaaatctcaaacgcccacaacagatagagaccgaactgtctcacgacgttctgaacccagctcgcgtgccactttaatgggcgaacagcccaacccttgggaccttctccagccccaggatgtgacgagccgacatcgaggtgccaaaccgctccgtcgatatgagctcttgggagcgatcagcctgttatccccggagtaccttttatcctttgagcgatggcccttccatacggaaccaccggatcactatgctctagtttcctacctgtgcgacttgttagtctcccagtcaagcacccttgtgccattacactctacgaccggttaccaatcggtctgagggtacctttagaagcctccgttacacttttggaggcgaccaccccagtcaaactacccaccatgcaatgtcctcgcttctgcgagttagaacccaaataacaaaagggccgtatttcaacggcgactccacgaatactggcgtacccgcttcatagtctccggcctatcctacacatttgttacccaaatccaatgcaaagctatagtaaaggttcacggggtcttttcgtcccgttgcgggtaatcggcatcttcaccgatactacaatttcaccgagctcgcggttgagacagtacccagatcgttacaccattcgtgcaggtcggaacttacccgacaaggaatttcgctaccttaggaccgttatagttacggccgccgtttactggggcttcaattcaatgcttctcttgcgatgacatctcctcttaaccttccagcaccgggcaggtgtcaggctatatacagtatctttcgatttagcatagccatgtgtttttgttaaacagtcgcctgggcctattctctgcggctcacagccttcactgtgagcgtcctttattccgaagttacaggactattttgcctagttccttaaccgcgaatcactcgagcgccttagtatactcaacccaaccacctgtgtcggtttatggtacgggtaatcatgcaatatgcttagcggattttcttgggagcaccgttacagttgtccatatctccttgtgcaagcactcagagtactgtcaggttcggatctccgagcggatttgcctactcagatcaactcctacacccttcaaccaactattccgtcagttggcaggaccgtcacatctccgtctccacatcgctcacataattagtaccggaatattaaccggttcttccatcgggtacgccgttcggctgccccttaggccccgactaaccctgatccgattagcgttgatcaggaacccttagtctttcggcgaggaggtttctcacctcctttatcgttacttatacctacatttgcttttctagaaactccagcaagagttgtcctctcaccttcagcgtcgctagaatgctcccctaccgatgtttacacatcccacagcttcggtaaatagcttatgcccgattattatccacgccaaagcactcgactagtgagctgttacgcactctttaaatgaatggctgcttccaagccaacatcctagctgtcttcgcactctgacttcgtttggtcaacttagctattatttcgggaccttagccgatggtctggattcttctcctctcggacatggaccttagcacccatgccctcactccgtggatcttacttaacgtgcattcggagtttgtctggacttgatagccggtgaaagcctcgcatccaatcagtcgctctacctcacgtaagaaactccacaggctgcacctaaatgcatttcggggagtacgagctatctccaagtttgattagcctttcacccctaccctcagttcatccgaaagcttttcaacgcttaccggtgcggtcctccagttggttttacccaaccttcaacctgaccaagggtagatcacttggtttcgcgtctactccctctgactaattcgccctattcagactcgctttcgcttcggctcacgtgactcttcatcacttaaccttgccagagaaagtaactcgtaggttcattatgcaaaaggcacgcagtcacagctctaagctgctcctaccgcttgtaggcagacgggttcaggatctattgcactcctctgttcgaggttcttttcacctttccctcacggtactggttcactatcggtctctcgggagtatttagccttacgggatgggccccgcagattcacacaggatttcacgtgtcccgcgctactcaggatacctctaagtccaacgaagattttcggatacacagctatcatgttctatggccggcctttccagaccgttctcctaatcttgtcttcctat

SEQ ID NO: 82 - DNA, 1708 bp, Porphyromonas bobii
  source 1..1708: mol_type = genomic DNA
gaagacctaaccgtcaattacgacctttacttaggtagagatacactaataaatctgaagcaagaatcatttttagagcaagacaaacagaacaaagtacaataaaaatattgacaatgaagagtttgatcctggctcaggatgaacgctagcgataggcttaacacatgcaagtcgaggggcagcatggtcttagcttgctaagactgatggcgaccggcgcacgggtgcgtaacgcgtatgcaacttgcctcacagagggggataacccgtcgaaagacggactaataccgcgtacactctatgttgggcatccaatgtagaggaaatgaaattcgctgtgagataggcatgcgtcccattagctagttggtgaggtaacggctcaccaaggcgacgatgggtaggggaactgagaggttgaacccccacactggtactgagacacggaccagactcctacgggaggcagcagtgaggaatattggtcaatgggcgagagcctgaaccagccaagtcgcgtgaaggatgactgtcttatggattgtaaacttcttttatacgggaataacaagagtcacgtgtggctccctgcatgtaccgtatgaataagcatcggctaactccgtgccagcagccgcggtaatacggaggatgcgagcgttatccggatttattgggtttaaagggtgcgtaggcggcctgttaagtcagcggtgaaatctaggagcttaactcctaaattgccattgatactggcgggcttgagtgtagatgaggtaggcggaatgcgtggtgtagcggtggaatgcatagatatcacgcagaactccgattgcgaaggcagcttactaaggtacaactgacgctgaagcacgaaagcgtgggtatcaaacaggattagataccctggtagtccacgcagtaaacgatgataactgggcgtatgcgatatacagtatgctcctaagcgaaagcgttaagttatccacctggggagtacgccggcaacggtgaaactcaaaggaattgacgggggcccgcacaagcggaggaacatgtggtttaattcgatgatacgcgaggaaccttacccgggattgaaatgtagatgaccgctcctgaaagggagttttccttcgggacatctatgtaggtgctgcatggttgtcgtcagctcgtgccgtgaggtgtcggcttaagtgccataacgagcgcaacccctgtctacggttgccatcaggtaatgctgggaactccgtagagactgccgtcgtaaggcgtgaggaaggtggggatgacgtcaaatcagcacggcccttacatccggggcgacacacgtgttacaatggtaaggacaaagggcagctacctggcgacaggatgcgaatctctaaaccttatcacagttcggatcggagtctgcaactcgactccgtgaagctggattcgctagtaatcgcgcatcagccatggcgcggtgaatacgttcccgggccttgtacacaccgcccgtcaagccatgggagtctggagtacctaaagtccgtaaccgcaagggtcggcctagggtaatacaggtgactggggctaagtcgtaacaaggtagccgtaccggaaggtgcggctggaacacctcctttctggagttctgaaaatgggctttagtatagttagtgtagtatgtacgtaagagatgagttaggtg

SEQ ID NO: 83 - DNA, 1421 bp, Porphyromonas bobii
  source 1..1421: mol_type = genomic DNA
cggatcaatttgtatgtgccaatccccgtagcttatcgcagcttatcacgtccttcttcgcctccgagagccaaggcatccaccgtctgcccttatctgtttttgcgcctaacgtacttctaacattactatcagaaagcacgcaggttgtatactaacttattatatatgctctacgttgttttctcgtttgtttttatcaagtatgtcaatgatcgctaagagggccgctggtgttaaccttgtgactcctccttgagtcaatcataagtaagtcgccttacttatatcgtcttcgctaacgtctttaccccccttcctcagctaccctcgctcgggtcagctcttcttcgaggcggttcgtttctcgtttgcggttgcaaagatagagcaaaaactaaatacaaaccaaatcttcacgcaaaatatttctcaagaacacccgttgagttgcattcatttccccataagcaagagagttacagggggcaaaaaaatttcattctcttgggggagatgggtgcttttctgggagaagaaggagggagttgagcggggaagaggtccgcttggcgggggaatgaagggcacaaagggctggtgacggtcatataatgatatggggaggcagcgcaaaccaatagtcattcgtgggtgaagtagtagtggtttgaatgcaaaccactacttattcgagtagcaaacgagtagtgcttcgcaccccaaaccaatagtcgtttgatcccaaacaactattgaagcacagcacaccttctcgaaagtaggaggatcgagctgctggaagggcgttgcacttggcgggaataaaaggcgtacgaaaagggaaaagccactgcatacccccttattccttttgagtagatgcagacatgagtgatatcaacctatatagtttcgcccgccgacctatatagcttcacaccaccctactaaaggcagccttcccacgccccctccgaagagtagaaagcaatcagtactggtcaccattccaaccactactggtcgctattagtgaccagtactgcttcgccgtgtaaccagtactgctccgaccactgaccagtactggtcaatttcaccacccaataaaagcgccgtccacctaccccacagaagggataggcagacgacgtcgtttaccctaccaatactattaagaagcgctataaaacgaagcgaggcggtgaccagctggatagccagtcaccgcctcgcgatgggtgagaagatcgatatgacagcagaagcgagtacgcacattcagaaaaatcacctaactcatctcttacgtacatactacactaactatactaaagcccattttcagaactccagaaaggaggtgttccagccgcaccttccggtacggctaccttgttacgacttagccccagtca

SEQ ID NO: 84 - DNA, 942 bp, Porphyromonas bobii
  source 1..942: mol_type = genomic DNA
gccttgatgatgttcaagatcctactacttcagacctggtacggcctgagtgattacgaagtcgaagaacggatcaacgactccctcctcttcagcgaattccccctcttggatatgggccttccagctccagaccacagcaccatctgtcgctttcgcgctgaactgacccgcttggggattatggacaagctccttcgcgagctgaataagcagttcaagaagcacgggattagccgtattgaccaaggggctattgtggatgcgagcattgtggatagcccgcacgctcccgatgggagtatcctcatcaaagtggccgacgaccgagaggacttgcgcaccgaagaagggcaagcccaagagcaggcttatcagtatgagctaaaaagtcgcaaaccaggggtggatacggaagctcgttgggtgcgcaaaggcagacactatcgctacgggtacaaaaagcacgtgctgaccgatgggcaagggttggtggagagcataattaccacgccagccaattgtgccgatacggtggtattgcccgagctgatagagaaggctgagcttacgcagggcgttagtgtccttgccgataaaggttattgtagtaagaagaactcggcttgtctccttgagcgcggcttgattgatgggattatgctcaaagcgcagaaggggatgaagcttacagagcgacaacgtgaactgaataacggcatcagcaaaatacgctgtttgatagagcgcaccttcgggagtattcgaaggtggttttcaggagggcgatgtcgctaccgagggcttgagcgaacgcatacacagaatatcttggaggctatggcatacaatctgaagcgtatgcctaggcttcttgtgctccagagcaccaaatagcccagaaaagccccctctcgggaggatgatcctcccgggaagggg

SEQ ID NO: 85 - DNA, 20 bp, synthetic construct
  source 1..20: mol_type = other DNA
  misc_feature 1..20: note = Peptoniphilus coxii forward primer
agttcttcactccgctgtcg

SEQ ID NO: 86 - DNA, 20 bp, synthetic construct
  source 1..20: mol_type = other DNA
  misc_feature 1..20: note = Peptoniphilus coxii reverse primer
cgccataccctttgctttgg

SEQ ID NO: 87 - DNA, 20 bp, synthetic construct
  source 1..20: mol_type = other DNA
  misc_feature 1..20: note = Peptoniphilus duerdenii forward primer
tcgtggcaaaagcgttgaag

SEQ ID NO: 88 - DNA, 20 bp, synthetic construct
  source 1..20: mol_type = other DNA
  misc_feature 1..20: note = Peptoniphilus duerdenii reverse primer
gttggtccgtcatttgcgta

SEQ ID NO: 89 - DNA, 20 bp, synthetic construct
  source 1..20: mol_type = other DNA
  misc_feature 1..20: note = Porphyromonas bennonis forward primer
actcacgacgtagccaagac

SEQ ID NO: 90 - DNA, 21 bp, synthetic construct
  source 1..21: mol_type = other DNA
  misc_feature 1..21: note = Porphyromonas bennonis reverse primer
tccacctctacagcgatctga

SEQ ID NO: 91 - DNA, 20 bp, synthetic construct
  source 1..20: mol_type = other DNA
  misc_feature 1..20: note = Anaerococcus prevotii forward primer
gcaaatacaactccaccgcc

SEQ ID NO: 92 - DNA, 21 bp, synthetic construct
  source 1..21: mol_type = other DNA
  misc_feature 1..21: note = Anaerococcus prevotii reverse primer
tgcgaaaactcgttcagaggt

SEQ ID NO: 93 - DNA, 21 bp, synthetic construct
  source 1..21: mol_type = other DNA
  misc_feature 1..21: note = Anaerococcus lactolyticus forward primer
cgctgaaaacaacaacggact

SEQ ID NO: 94 - DNA, 20 bp, synthetic construct
  source 1..20: mol_type = other DNA
  misc_feature 1..20: note = Anaerococcus lactolyticus reverse primer
ccgctaactctacgccgata

SEQ ID NO: 95 - DNA, 20 bp, synthetic construct
  source 1..20: mol_type = other DNA
  misc_feature 1..20: note = Prevotella sp. forward primer
gcacggtaaacgatggatgc

SEQ ID NO: 96 - DNA, 20 bp, synthetic construct
  source 1..20: mol_type = other DNA
  misc_feature 1..20: note = Prevotella sp. reverse primer
ttcaagcccgggtaaggttc

SEQ ID NO: 97 - DNA, 22 bp, synthetic construct
  source 1..22: mol_type = other DNA
  misc_feature 1..22: note = Prevotella timonensis forward primer
gagcaagaaagcatatagcggc

SEQ ID NO: 98 - DNA, 20 bp, synthetic construct
  source 1..20: mol_type = other DNA
  misc_feature 1..20: note = Prevotella timonensis reverse primer
tcgcaatactccaagggcac
